United States Patent Application Publication US 2026/0191916 A1 - sequence listing, part 106

SEQ ID NO: 667 - DNA, 3377918 bp, Faecalibacterium prausnitzii (residues 1,688,960-3,377,918 of 3,377,918)
  source 1..3377918: mol_type = genomic DNA
agtactttccttccattgcttccacttctaccagctcctttcaccttaccagactttctattatgtattgtgatcttagtatagcatagcgtaacatcttgttcaatcagagtatttgctcaatggtgtccacccctcatcatagtataccgaattaatccaaacattgcctgcaccacgatttatatatccaatgccatttctaaaaattatggggtgatttgcttcttcttctgttattgatattttttctgtttcctgaatcttaatatcacaggaatgattgttgccaagatctaattgttgctcagtttcgtaaatccttaaaatattttccgcatcatttataacaattgcataatcacaatcgtataacagctttgctgaagccaaatggtgaactgttctgtccgcatcaattttgtagatatcgtcgttacatccaatagtaatttgatagcaaccagttctaaagtccttgaaaatagttaatgctatgttatggttcagtctattagcatcaacatcaaacatttgccctttcgctgtattgtaagctttctttaggaattcaagatttgaaattctacaatcatgatggatattattcatgtgatccacaacatatccatgttccgtcatatcttgtaacacatcttttccataccattttcccatgatatatctgtgtagcaaccctaaagaactacttttaagatatcctttatcatcagtattgctattagggttcgtaaaattccatgtggatgaagtgagctcgttataataatcttctctatatgttgtcaatccaacatgttgccacccatctctacgaatgtgtacttcatcattaaatctctcgaaaatattattactcggcatgtctaatcacctcattaccacatatattctacaataacctttacatcttagccaatcatactcacatatacgatcgttgcctgctgctcaccacggagaggtggcaaagtttcgagcagcaatgggagctcacgctcccacaattcatgtgatttcctctatgatattacgtggaggtgtaaatcacatgaagaataaattagattgattcgatgataactggaattgggatgtacaacccacacgggtactgtatgaacttctgttctcccctacttaccggtggccttggagagtcaaagaggtgtactcctataagtggggtgctgagtttccaaagtgtccacggtgcggaaccacaatggaacgcgagtaccaacgcttctgtgaccgttgcggtcagcggctgaactgaagtgggtttgatgatgtcgaggtacggtacatagggtgggatggagttgaggatgacgaggagtccgatgctgatggtgagcaagtggatgacagcaatcaagaagatgccaccaagacagactgaaagccacggtttcccgtggctccagtatatcacaaagaaaataatattgctattattctttcattaaatcgtgcattctttttctcattagcgtggatgatatgtttttcttgcgcggaacaaatatggtgtcaacccctagttcttccaatttttcctttgcctcttggtaaataggctccgataaatgatctgccccagcaatcatcaaatcgaaatgatactgatgatatgctttaactttgtccaaatcaacttcaggtacaacttgatcaacataccgaatcgcgcttacgacttccactctctgctcgtatgaaagtattgttccatgatgctttctttgcatcataaagtcatctgttcctactgcaacaatcaatcgctcgcacatttcttttgcctgccgcataatgtcgatatggccatcatgtaaagggtcaaaaaatccgcacaaaaaaccgactttatattttttcatcttttttcaccaatctcataatgataacatctttcaaatttctttaactgcccccttaccatttcttgaacttcttctaagctttttcctctcacatttgtttcactatctgtctgcattctgcaaaagctcagcacgccgtctgctctcatcgtaagactcataattcctgttgcacacggtttagttaatcctgtttgaacatcaactgattccggataatatttacactcctgacaggcctcactataagtacgccttggagtgactgaattgcctttattcatgtgatccacaatcgtcaaagtgcatccatcgtaaataaagcgtttcatatgaattcccttattattgtgtacatatagccctgtctctatatagtttttctttctcagtgtttcaattagaagattcagttctttttctacattgtctgcagacactatacctccaaaatcgtttacggttaaaaccttaagaccaaccagcctcttactatgtgcgtagttataaacggattcaatttcgccaacatttttcttagtagcaacaaaattcaattcaattttaaaccctttgagcttcataaaagatatattttccagtacggtcctcagctcatctacacctgttaaatccttaaacacctgtggcttaagtgtatccaagctgatcttcaataagagaacatcctttatttcctcccacacaattgaattgttttcgtaacactgtttcagtaacaatccatttgtacataaaacaactttttcatagctttctaatttagcatggtgcagtgtctcagacagtctttcaaaatccagaaggggttccccaccagtaattctgacgacttttttctctgtccatcttttttctttataataatttgcatatgccgtcaacaaatatttaatttgagaaatatcgcacagagtatcacatttctgtaaattttctccaccttccgggcaataatcgcaatccatattgcatgcagacattagattaattaccaatgacggtttcatgtcaaaattatctaaaacaaagctacatcgatccggaacaatacttgaaaaactcgtactagcattttcccaagacgagttgaaaagatctgtaaagcttcgataaacagatgattttcttgtatatcgatacatatatgatttcgagctaggctctcttgtatagtatcccagataaatactccggtcagttattataaatcggtataaaagcggctgttcatgaaaccttaatgcccagccatctgttttaggaaaagtgtcctttaatttttttatgtctagataattagtcttccactgtttttccagcttttcttgcggtgcaaattctggcacattccgtaatcttttttcaatataaatgctatatggatcagacactagaagcctacactcaatatcctttcctttttcataaagagcattcgctatttttgaatttccctctaagaaagtacctcctcgcaatccaaaaaatgcaagttttttacttacctttatatccagtgccacatcggttcctatatcaaaaatatttttataaactttcggaatgtcgtatgaattttttaccattccatttgttgtgctttccctgtaaatacctgatggaaagcttcgtaagactccacttgcaatttcccaactagagtcgcccctatattcatataaccttgcttttattgccttagtcctatcatactctgcaactagaaatacagggcgcgaatagctatccgataatgtacacccacaagtgaactgtgataccccaccctgaggaatcccatacggttttattgcctctgtcaatatgctcaatcctggtgcatggttatgtccgcaaaaaacagcctttacattattatctacaagccaatgctgaaagcgtcttccatcttctgcactcaaccattcaacaccatgatgcattattacaatattagttttgctttcatcactttttatttttcttgccagttctgccaaattcgtaaaacttacaaccaattttccgtaatctctatcatccatcgaaagcaaacatgaatccactgagattattctaaaatcatcaattgtcttcaaagagaatggttcgtatatatcaccataaagtaacgtatataactccttgaaccgcccatatccattcaaacaagtttctaggtctggtagtgttccatcctttcgatatgttttaatcgcagtattacgggatttaattttcctatcaatgtcatgattaccggggcataaaatcactctgcttacatctattccacaggcttctgctatctgtgaaatataggaagcaatttctttaagatttcctctattctgatgcaaacaatctcccgtaataagcacaaaggaaatttcaccatctgtattttcttttcttaaggtctcaattagtttatctcgtgctgttactgtgttgcaatttttgaaattcatgtgcaaatctgaaagaacagcccatttcataacattttctcctttattcaagttacaatgcttgtagttcgtttttgtgaattctaggtaaacgactcgccatttaatatattcgcaccaacaattattttttatctcagctgccatttcaaacagttgacattgcctgctgcccaccacggagagatgtacaacattcgagcagcattgggagtttctgctcccagtatatcacaaaatcagaaggaaatcatcattgttaagaaaatcccacgaaactttgttaaagcattaaccctttggctcgtgatggaaatatataccaatatcaatccctgccaccaagcagatatacgactcttttccaagtgaccagtccaaaccacaaattggaactaagagcagtactcgattcatctgatccaatacgacttgagacaaacaccgaggaattaagatggatgttaaagataaagaataggccgtatctgccgtacttagcactcacaattttctatgctctatccacatgaatggtaactgtaaaaaacaatccaacaacagcccaaatgcataagaaaaacaaaacccttgcttcggccttattgtgctcattcgttttttcataaattataaaatatatttttttaatatcggtatttgatacataatccaagaaccaacaaatgatacaatcgtgaaaacaagccaaaaaacagctgtcataactggatatagggagcttccgctcccattatatcacaagtctgaaaacaaatcagccttgtacacaccatccgccaacattttcttgaagctgttttttacggctgcgacatcctcatgataggtcatgccataccaagtgtcattggtcttcaggacctttacggacatctttccctgctccagcagctcaccgatgaagattgggatcagatactcggctttctgaggattgctcggtacttctttctcgaaaaactccttgaaaccattttccagcacatccaaaaaatcaggagtcaagccccacatattcatggataccagagaattcacatcaacaaccacaccgtctgcctctgctccatctgcagtctttacgatgttcttggtttccacaacctcagtcaagtttccattctcatccatcttgcagataccacgagtcacaccgccgttatcagacagcgtgttcttcagcacaaagccagccatgcaggacttgccgccattcaccagatactcatggacggccttgaagccttccttgccatagtaatcatctgcattaatcacaatgaacggagtctcgatgaccttcttcgctgcgagcacagcctgaccggttccccacggctttgtccgacctgccggaagttctcccggaatatcgttaatatcctgaaatgcgtagtccacagttacattgtgggacttgcaaatggaggcaatgcgatcaccgatgacctctttaaactcctgctcaatatccttgcgaataataaatactacatggttgaaacctgcctcaatcgcatcgtggattgagtagtccatgatgagatggttagcatcatcgaccggctccaactgttttattcctgttccaaaacggctgcctattccggctgccatgataagtaatgttgttttcattgctttttctcctactccattagtgtagtgttattcgccaataatcatcggtgcaatttttcttataatcaatgtacctatatagcacatgctaactgtaatacatgaaaccgcaaatgaacacagaaagccttccactgtatcaggcttttccaataaattctttgttaccggtagaaccgactgaaagaaaagaatcggaaatttgtgcatgatgtcagatttctttataaatatcatctacgcttttgcgaactgaacacggaattaccgtttcctcaagataataccccgctgcaattacaacagcgattcgttcgctgtcttgcaattctaaagccttccttactttcaaatcctctgcatgcttattcgaccactgtaaacagcatgagcctattccccttgcatggagaccattaataaaattcattgtacataaaccagcgttaaatagcccctgttgtctctcaccggaataagcaaatgctgccaaatcatatgtgacaacaaagtaattaactgtatctttattaaatccagatattcctataagtgtttcatctaaaagattctttacgttattgctttttactaaaaagactttacacatctgccgattgcatgctgttggagcttcttgaaaacactttactgcaaaatcaacatcggatttcattaaattttgtttcttaaagtctctaactgaatgtcttgaaaaaaggatatgctcaaatccattgatttcttcctgtggaaacgccttataactataccttttacttcctgtcacaaattcaggctcattgtatgaagtcaagaaatcgttaacttcttgatatgttttctcgttgctccagccatgcttctcataaaactttttccaggaaaacagcgtctctactgcaatcttatattcaaagtcactgctatcgccttgatagttttttatcaattcgataagtttttcaactttgcttcctccaaatggacgtggcgaaggcatgcacattcccttttccagactatgcactaaaaggagaatactgtatttataattttctttttcctctgccgcctcaatatatgatgaagaaaacccatgagcatcatttaagaattctttgtagatttttaaggatttaccaattcttcgaattgttttgcttcgctttatcacttctgtaaagctcatatttctgacctccttttaccgtttgcggatggactttattacactgattatccttttatactgaccaattgcgacaatcaagagaagaattgccatcaaatagcgaatcattccaaactgatacaagaaaataaatgcaattgaacatccaaatactcctattgaaatcagcagtatacttttactatcaaaaagctcaaaggagccgatttcttccatacatacttttctgctaaaccaataatgaccagtgctgtacactatatagcttgcaactgttgtgtacccagcagcgtaaaatccaaacaccgggataaaaatagcattcaagataatgttaagtattgctgcagcaatagaagcaaccgacataaacttttgcttttcataatacatttgaggaatagcgaaaacattataaagaaaaataaaataaacactcgccgcaactggaggaacaacatagatagcactatagtactcttcagaaccaaatatttttacaagttcaggcacaaaaaaacacagtccaactataacgccgcctaagaaaagaagtatagcattaacatttcttctaatgtttttgtaatctttacgattcaaattttcatacatccagggagttagcgaattatttatcgcattcgtaaagagctgtaccagcattcctatactataggcaacgctatagattccaacttctgactctcccaccatattttgaatcataatgcgatcaccctgattcaaaatcgttccggacagatagtgtggaataagtggaatattaaatccgagtgcatatttccagttatctttactataaaacgtcttacctcttacaaactgaagaaccattatgcttccggcaatcactacttctacagcaacaacagaaacaattctcgctaaagctttatcatctctggctatgattactaaaatcagtcccagtactggattgagtgcagattttaagagtgtaacgcttaccatcgttttatatctgtactcaaatctttgccgcgccgaccaaaattgaagagccggttcaacaagcaattctgccatcatcaaccacagaaccaatttgtttaggccgagaagattgctccaaaaatcctgaaatggcgcatatataataatcagtacgattgttagcgttattgtcaacccttgcatggatgacacatatttatctctctcgcacttatcacgaattctgtttaatgcattattgaatacaccgtaatagagatttaatgatgtcacaatagttaatatattaaaccatgatatgtacaagctatacgttccatattctgctgtcgttaacaaccgcgtgaataatggaacggttatcgttgatatgcctttctgcataatgttgcagaacacaaaccacagagctgctttcgttgcaatgctcatattattatagaattttttaatcttattcagcatcgctgactcctacaatatgcagggtatcactcactgcctttctctgtgcataaatgcattttgtatcaccttgataatatccgcatccaaccacggcgataatagcctcatgagatgatattcccaataattcttttaatttgttttctgttcgataaaaggctttccactgcataatacagtttcctatgcctaaagaatgcaatgcaagggtaagataagacaggtaaattccaccattaatgtaccattggtactgttcctctttcataaagcatgcacgatctgtcgtaactatgatataatttggcgtctcgcctttaaaaccactgcttcctgtaataagatcatcaatctgcttgacagtttcgcattctgatgtgaaatatactttattcggctgtctattacaggctgaaggggacatattggcaatttccactgccttttgaatatcggactgatttaatggcattttttgatacattcttatactatgcctagtctcaaaaaaactttgcacatcaaaatctttgccatgcaataattcttttaggggaacaatatgtgctccaccattcaaatcatctttaatgctcgctactaagtttgaatccaactgctgagtaagaacattaaattttctttcgatttctgcaaattccggaaatttcgaggtgtcgaattctttctgatattcgatatacgcagctattacccggtacgtctccttaaacgcaaaatctgttggatcatatcctcgtccaatataaccgaacattttattgatcaaattagtgaccggctttgaactatgccctggctttgtattctttaatccaagccctttttctacggaatgaacttccaccagcattccatttttataaaatgattcaaaagcatcagaactaagtttgcttcctctcctgaattcctttatggaaattttaagttcatagcatctaacagaaaagtactgaatcgctttttttattttcgtaatcaatgttcatcactccttctcaatcgactatctcaaaccgtgattttagtttgtcataatactccgttttgaaatatggcttattaactattgtgttgtttgttttcacaatattcattgcaagcgagtaggcctcatctaaagaatcagcattatactgtgaattggcatagatgcctttaaaccattctgttcctgtttttactttatgatcgttggtagcaattacaataactggtgtgttagaaatcattgaaaaaattgtcccgtgatagcgatctgttataacaactttatgacttgcaaaaaagtctaatgttttttttaattcggagctaaaatttgcaatcaattctttcagtggaagatttgaattagtatccgctatctcacaaaacaatcctgcttcttgcaacttgttctttaattgctttatctcgtcatctgtatactttttttcactatcatttctgatgcaaagcaaaacaccatctcgttcggaagtattcggcattgaaccaattaatgtagttacaatatcaggatataattgcacatctgtacttggaaagaatctctttgcagactggtaggacaccttatctctcgccaaaaaaagcaggtgcttatgttctgcatagatttttccggtcttatatccttccctctcgtcaataaagtttaccgtttgaggcataatcaatattttgttttctggaaaagatttcacgagaaatctatgcatcttatgatcatagtgacgatctgttgtacaatagccactttggattacaataagatcatcctttttaatcgctttttttatcctttcgcggaaatcccgttcataaaaaggccatgtcgaaatttcaagaatctcatgatccggataattttgttgacaccagagtctaatgcaataccgttgtgcttggtctcccatatttttatgtacaggaacgccgcaaaagaaaatatgttttttattttcagtcatattctctatcaacatgactgcctgccctttttcctgtgctcgctgaggttttgcatcgaaatctcttttcagcattttcagcttaaacaaatcacagtaagcattcttcgttagtctatgacttaaaataaatccttttaaactacttttcatataatattctcctcatattgaattgcatatgcctcctatttacacatgacttttttcagcttatccgtcatcttcttttcgatgagcctatatgaaataattgatgcaattaaggttaaaataaatgctaacagcattccagtcacacctgtcaacgctccatgaaccacatgattcacgattttacttacaaccgcgattacaaatttgtggatcaaataaaaggaaaaactcaaattcccaaaaccaacaatccatttcggaaaattaagcgccggaaatataatcaatccaattccagctgcaatagttcctaaaaccaaagcaaaagaatcaccgacagcataagtacaaagcgcaaacagcacagcataggcaattaaaaccacattagaatttatatctgctggcatggttttcttgtatttttcagtgttcttataaatgctgattagtacgcctatcaaaaacgcccactgatacttatacgaccaaattacgagaatcggcacatcggtacaatacaggtttaacacattacccagaagcacaagacctgcaaacagaacgaccgtcagaagttctctctgcttgtttttcttcaacaccttatatagcacccaaaagacaatatactcatacatttccaggattaatgtccagcccacactcaaaataggaaatagctttccatcagcactataatatggaataaaaaacaatgaatgaatcaaattgctccacgagtacgattttcctccgttaatcccaggcataacaagtgatatcaaaaacaatgcaatcgtaagcatccaatataatggcacaaggcgaatgactttttttctgaaatagaacttttcgctttttcttgttccttccataagaaaatatcctgtgaatataaagaacaccacaagcgaaaagcccgaataattactctttaccccccccccacgctactggcagatgataaagaaatatcgaaacacatgcaaatgcacgcatcacttgaacaatctctaatcttttagtggtcatgaccttttaattcctctcttttctttcatggttacatatagaattgaaaacgttagtgaaccgagtacaacaaaaatgtatcctagatattgttgtaaagaattcatatcgaaaattttatattcaattctggaaaacaaaggatgtataatgtaaaatattagcgaatatttccttccgaatgttgcaatgactgcaaatactttgtttttccaacaactactaagtgcaattccaaaaaccgcaatcgctaatggcatggaaaagaaatacgatccactcagccgatcaatttccaaagctgacaatatatatttttcgagaaaaatgcataccattgatattgtagctaccaatatccagttcgatgttccaactttttgaattttctccttcttttcccagcattcaattccaaggaaaaagtatgccgcaatcggtatcaaaaagtttctgtacaaattcggatcaatattggcatttgcatcaattaaaaagatgtacttactgagaaacggcaatccgaaacaagtcaacataattatacttctccggacgcatttatatttccaaagatttgaaaatttccatgcaaaaaccaaaatgtaaatcatagcccacatataccatgaatggtccgcatgaattgggtcatttaaaagtgcaaatctcacaatattgagaagattgaaacatttattccaatagctgatagcctgtcctgtaaaaatattttttattgaatcaataaaaaagtaaagaagaaccatttcgactgcaatacgagtgaatttttttatctgtatgatttctcgatgtttgtttactgttgaataataaaaaaagcccgtaatcatcacaaataatggcaccgctatacgtgaaattgcaagtatataatcggatataccatacgttccatatgcatgctgataacaaaccagtaatgcagcaattccctttaatacatctatcgaatttgatctaggttttattttatctttttccactctatttctcccaaaagaactgataaggtacggttccgtacatagatgctgcactgctataagttagccaaataaaagcagctgtcataaaaaagtacatggtgagttttacaattttcttattgttaatatttttaaagcagttaatagatctaggaagtagtacataaacaaaaggcataaaatagtatgtcattcttgccataatattaattttaagtcctgtaattctacatactgccaatatcaataccatataaagcaagaaactattactaaatccactttcatctgttactgctaatccactgctttggttgtttctttttttattataataaaccaatgataatgttccgattgcaaaaatcaaaacataaataaaaacaaaatacaaactgattatattgattgcctcaccgctcgatgaatagaattctgtataatcacgctttcctatctggagaaatgatactgctttgaacatctgattgtataaagcaaaagatgcaatcatcacaagcgttgaaataaaaatatgttttcttttaaatggaagataatcaaatattggcataaagaatgcaataaatgcagacgagtgaaattgcattgccagaattacaatcgctacatacagtacatatcttttgattctccaatcctttctcttccaaatttctaatgcaatcaatacaatgcatactgccatagcctgtcgcatcatggtcatatacataaaccatgtatttgttgtgatgaacaaaaaagtactcattacaacattctcggaattcctatatataaaccatccggttataccaataacaaataacgcatggattgcaatcatccactgcccattatcggtaaacatgctaatgatcttataaaacacaaggtaaccattttcgtatcccagtgtaaaaagattattccaatccatatttacgacacgcaaaaaagttttatagtaatgactctgtaaatcacgtccaacattatagcttcgcaacattgcaataagtgctaaacaagcaaatgccacaaatgtatagatttttcttcttctattcgtcgtgttatgattcttacacgcaccatataacatcagcacaaataaggcaactaaataaattgtcacaacatcacctccacaccatctttgcaatgtctagtattaatcaactttccatattttcagtctggtatgtttcaaatactttgctcaagaattctctggtctttttccgctgttcatcaaaaatcgtgtttactttttcaaaatcaaccgacctgtttataacatcaaaatcctgataattttcaacatgcctttgcagtgtgtctgtcatgcgcaatatactttccaaccgcccaccatactcgcttggatagatacaaattggctcggtattaagattcaatgaaaatgctgttgcatggaaagagtccgttaatacatatttagcattatcgatcaatgtaataaattcaaatacttccggcacaagaatactcttgccaggccttacaaattgatcatatctccggcatagaaaataaattggtagacccgttcttttactcagttcaatcgcatagtcatcaaattctttcgagcggttaagattataaattagaatataatcgccctttattttacttttcggtgcatattttctccagaaattcccgtcataagccagtgtcggatcgaccacatggacggcattcttatagccataataatcttgcaacatagtttttgcataatcttctctgacagaaataaaattgtattttgcaatcagttcttttgtttctttcacttcgttttctgctagcgttttcttgccaaaacttgctgcatacgcaaaacgaaatttttcatctggaacaaaatccaaaaataatgattttatgatgccgccgttccatcctgtattccatacctgatcgcttcctgtgcaaaaaatatcggcatcgattggatactttctaaagtcttcagggtatgtatatacatgctctgttaaatcaaaatgttgcgtgataaatttattgaaaactgatttccatttcatcaatgtcggcaacattgctatctgttttaccggatttgagccacaccaagtatgtaataagttcttatccaaactatcttctctaatataattgatcagttttacgtcacagccatactctttaaagatttcctgtgtggctaatgtttgcagaactgatccatagttttttatcgcatgaagcgttataagtgctactttcatttttttctcactcttctatattacagtaaaaattctgcatttttttgctttctattttaatatcataacctgcttgtcttaccagattgctatatctttctctctcatgcgttttgatactaccggagcacatttcctttgcccattgatcttctgtattctcaatcggtagaaatttaatcaagtcggttatatccatttctgttgtaactctatcagatacaagttcttggactccatttgcttgcgcttcaataagaacaactggaagtccctcatatttcgacggtagaacaaacatatcaaaagcatttaacaactctgacacatccgaccgaattccaagaaaacggacagaatttcctagattcatatcagcagcaagctttttaattttatcttcttctaagccgcggccaacaatcaatagtactgtatcgtctctttgctctgttacctttttataggcagaaaacaaaaacggatagtttttctgttctgaaagtcgtccaacaataccaataacaaacttacctgtaatttgaagttcttcttgtttttgtatacgcagcacattcgaaaactgaaaactatccgtatctaccgcattcgtcataatgtggactttgccttccgcacttgctttctttccccacatataaatgcctgcatccttgccacatgcaaataagtctgttgcataatgttttgcaatagacgcgagcatcgcatttacttttcgtttcgcattggaaaccggttcatatgcaatatgggaatgtactattctttttgggactttatacttttttccataatacattacaaaaagtccgcgtgatcccatgtgagaatgaaccacatcataatttccatcttttatgatttttttcattcccgtcaaataacctattttatctttttttatccttggaagcttataaattgtacaccccaaatccttcaagggttcttcatacattccattctcatagtaatcatatatcagaaaatcgaaatggattttagtatgatccatatttcgataataatcgtaaagaagtttagcaactccgcctccatctaaggctgacaactcttgtaaaactctaaccatcatattctcctatccgcgtgctgagaaaaacagtttctgaacaaaatcaaagccaatatatgataggagcaacgcccctctaaccttttttctacttttcggatttttaattacttcttttctattctcacttaaaaatacttttattggctttctaaacggctcgtacttcttttcaacagggatcataaagagtacaacaattacaatattacatattctggactgcaatgctttcttatactcaggtaatgcaaactcagatttaagcagtttttgtaattctgttgccgattcaatcttagtcgtatcaaagccatttcgcatcgcacttttttcccgaataagatagttgtagaatttttctttcatacatataacggattccacattaagaaaaactttgtatttgaattcaaaatcttcaccaattttcattttggtattaaatctgatttcacctatgcactcttttttatacaatgttccccagatagcagccatctcatatccatcaaacggctgttccaaataacacaatgcctcaactgcttgtttctgcgtaagcttaatgtcatccatggtttcttctttaggttgtttatcctccatgtctacttcattcacatggttagatgcacacatcacacagtcacaattattctctttcattgtagaaagcatcttttctaatgtatcttcttcaagataatcatcgctatctacaaaatacacataactcccttttgcccggtccaaagcaaaatttctagcaaatgaaacaccatgattatcgatatgaaaaacatgcatccttttgtcgaaacgagcatattcatcacatattttcccacaattatccggtgaaccatcatccactaccaaaagctctatgttaaaatgtgtctgcctcaatatactttccaaagattttcttaatagaacttcctcgactttatatacagggacaatcacactaatcaaatcactcacgtctgacccccccattttttatcggttctatggcatttttatagggaagctttactaggtttccactttctactttgccagccacaacacatccggcgccgattacgcagttatcacctacatccgccccttttagaagcacaacattactccctacccagcagtgttttcctacctttacacttccctgggaatatccctgttctttaattggcttagaaaaatccgcaaatctatgattgtgatcatagattctcactccctcgccaaatattgagccttcgccaatttcaatatgatttaggcagttgatggaacaaccgttgttaaaaaaacaattttctccaatttcgaccttgccttcttttgaaacaactaaattaaagcctttacgaaaagtaaagcctcttccaaaattaactctattcccgtttacaattctataaattgctttttttacttctgccactagatgacagtataatttcattaataccactcttgaattcctccgtctccataatttgtgctttatatgagacttcaattcagtgatgcaattaaattttcataatactcaagcagtttatttgcctcaacgccagaatcaaacccagctgcctttacctcttctgttttaccttttctgactggcatattcttttttaccgcctgaagaattgcatctgcccactcttccggagttttttccaaagacataaaaactcctaaatcatcgcatgcgctagattcctctgggatttcagtagaaaaaaacattggaagtccacagttttctgcttctacacctacgacaggcagaccttcatataaactaggaagcaaaaaacagtccattgcattataaaactggggaatatcttctcgtcttcccaagtaaagaacactattttttatcccatattcatcaatttttgcgagcattgcttcgcgtagatttccatcgccaattaccaataacttggcttttggttctttttttaccaatgcgttaaaaatatcaataatgaaaagtgtattcttctgttcggtcaaccggccaatatgcccaattacaatattctcttcaataccatattctttacgagttgcatttctaagtgattcatcatacttgtttacatctgtattgataacagttttaaacactctgacttttccttcatcaaataatttatcaccaaattgccaacgtccacaggcttctccatttgccataaaattagtagcaaacattttggaaaatggctttaagatattcttcagtatcgtttttttatcagcactatgagccatagatatactctcgctaattcgaataggaattccgcactgccaaccaacaaacatcgaaaacaagttcattgtcccgttgtatgaatgcatgattttatatttattctttttacaaatagccttcatctggctcatattcttaaaaatattctgatatggggcaactcgatatactctaccacccagtttttcaatttcttcttgtggaatagcatttgaatccgtatcacagaaaaagtcaaactgcacctttgacttatctatatttctatagtattccataacaagattcttttttccgccagaatgcattttccccattattactgcaactcgttccatcttatatccccttaacttctctcgtaatctttatataccgtattcctttttcataaaatccgctgtttttctgatgccgtcttccaaggatattggattaagcgcaccataatatttttcatagcggctaatgtcaagataattaaccggaacgtcaaccttacgtccttcaagataagaaacattcagttttattccaagggctttttcaatcgtttccaaaacctgcttaatgcttgtcccatatccacaaccaagattaaatgtacggtgtttattttctccattaacaattttcatgattgctctaattgcatcatcaatatagataaagtcacgtactacggagccatctccatatacggtgatttcgtctcccttaagtgccttatatgtaaatgttgttacagcacccaaaacaccattaggtctttgatacggtccataaggatttgcaaggcgaataatgcgataatccaaaccgtacatatatctataaagatacagtaatttttctatagtaatcttttgtacaccataagaagatattggatttgtcgctgtcttttctttaagagggcaatcaacttccttaccgtatactgttcctccagaagaaacgaacacaaccttcttaacgccgcaccgaatacatgcttcaaacaaatttgctgagaagataacatttgatacgagttcctgagatatatgctgattagaagttgttggcactgttgtactcactaaatggtaaacaacttcctgatccttaagaatcgaatcaaaatccatatcaacagttaaatcagcttctaaaatatgaacattttttaagtccatactaacaatcggtttaaaaaacgctttacttctatctacaagagttatttcatcttctgtttttttagccaactcaattgtgagattcgttccaataaagccagctgctcccaaaagcaaaattttcatgtgcctactcccccttactgtcttatgcccttctgtgtctaaaaagcatactttattcgttgctaattaagtcttatcggttaccgtacattttctcgtattcatacatttttgcactcctacttttctttctctataaacagtaacaagcctacggcagaccgcttatcgcaatctaccgtaggcttgtgttatcctcctgtttttatttgctgctccttttgtgggtcaaaacagagcttccaaaagcctcctacatataaccccaggatttcccgcttcttgcagtcttttcaacaaataaaacttttgaaggacaactcaagccgtcaaaaccctttagttatcgtagtttttcttggttgaccctattatatctctagccccagtacctgcgacggcaattttgtaatttttcatagtattaatcctccggccctcatcgggcatatcctcttattttctatgtacacatccatatggatggtatttcctgctaatttctcgtgtgttcaccacacaattggctaagtgctttcttgtgctatcgtatccaactaccccagcaatcatgttttctactccataaaacatccgttgagtacactcgtttctatttctctatagccgaagtgttgatttgtacggtcgaaccccgtataccctgcaatgatgtttttctaagtgttggactgttgaatcgaaccctgtcggcgcatgatttttgttaaaactgtatatatcatccagtccaattcttaccgttcattgttcgttatgaacaaatcattcacttcaaccactcaaaacatgtaattatcatcaccattcatgctctactcaacagctgttttttgaagtagaaatcatctgtttttctctattttcatgactcaacaaaccatctatgatgtaggcgtcattaagaggtcagctagtgtactcaacaacaactttacgaagtagatgataaactcatggatttttgatgtatttatcatcaaaaaggtcatttcagcagttttcctatccattactcgccgatgtgttctacatttggttttctttcaggcttttttcgtcaatatgtaccataatcgcccgttttactcccatatttcagtgcattatgcaacatcattgcactgtgctgagtgtgcaaaacaggttcttttcgactatgctacgtcaatacggtttgttgagtagacattcgtaggggccgctataacaacaaagtccgcatcagagtatgcagcctttgcatccagagttgcggtcaggttcagttccttttctgcaaggtatttttcgatatagtcatcctgaatcggggacttacgatttttgatcatgtccaccttctccgggatgatatccacagcagtcacctgatggtgctggctcaacagagttgcaatggacaggccaacgtagccggtacctgcaacagcaatcttataatttttcataataaactgctcctccaattctcattgcgcatatcttctaaatttagtttgtgtctatgtagtcatcccgaaagacggtatcgtgagtttttactccccacgccccagcaggcacaccttgaaggtcttaaaaataatcttccaatccacccagaagctgcgctccttgacatacttcacgtccagatccatccactcctcaaaagagaggtcattgcgatgcggggcgatctgccagtaacagctcaggccgggggtcacatacaggcgttgcttttcgtagtcgccgtactgctccacctcgcggggcagtgccgggcggggacccacgatactcatatcacccttcaggatgttccacagctggggcagctcatcgaggctggtcttgcggataaacttgcccacacgggtaatgcgcggatcgtccttgattttgaacacaggaccatccatctcgttctgatccagcaggtcatctagctttgcctctgcgttggggcacatggagcggaacttatagaacttgaagggtttgccgttgcggccaatgcgctcctgactgaatacagggcctgcagacgggtcatccaccacaattgcgatagccgtagccagcatgaccggcgacagcactaccagcgccagcgatgacaagatcacgtcctgcgtccgacgcccgatccaatacaggcgatggtcgcgcagattttccttgcggttaacttcaacttccttatcgattccaacagtattcgtagccattttttctcctcacataaatccttgtctatgcacttcttatcgtcattcgttttatcgcaattttcagaaatagtgccctatcaacacggcatatttgcgatatgcagtttgcggatgctacttgcgcattaaaaacacaaactgctataaagtaatccctttaactcacaccgttccagtaagcaccttccttttagataaccgttcctcttttcctaaaaccggcagaccgttattcctgatctccgggcaagcaaaagccctcggacgacagcttcgcccaaggtcatttcaaatgcaatgtggccgtaatgaaaaccagaacgtcatgctacagctcaagcatcgcatgtgcattgcttccagtatgcaatatttcacatttttgtagaacctcaacaagcccacttcattttcacctttgcgcatcacgccagcaagggaaacagcagtgggctttttattttgatctatcattcgggtttcctcatgatctatcacatgattgttcgcaaacagacataagcccactggattcacctccttaccgcaatcaaggcgtatccttccatcacaaaacagaggataccagttcttctacgtggccgtctgaattctcttattattctatcatggttatatctgggaatcaatagaaatccgaggaaatgtatccatccatgttttagaaaaaaaatgcgattcagccagaacttttttgcacattgcccagtttcgcatgaaagctccagatgaaatcatcgatggacaaaatgtgtggtcatatagttgtccaaggcgctggagagtgcagtcaggtgtgataagccgctccgatgtaatgacagccgttaaatagaacgcgcccctcgcactgaaaagccggtttatgtcgtcacattgatcaggagttctgacgaggcatatcgcacagtaccacataatttttaccctctcccctgctgctcctattatatataggtataacttgcatcccgtcaatgcagctgcaacctactctgagtcgggctatttgttcgcacaaaaaaagcccctgccgatcacatttccgtgaaaggcagaggccagttttacagcaacgaatccgtcatcgtctgataaacgctgtccgcattttgctctatgctctcatttataatgtgcaccagcatctccgaaagcgcagttcgttcgcccggagctgtgttcagcactatatcctgcagaatgtcccgcaagattttttcccggtctggggagataagacaactccgctgttctaaggaaagggagcccgcctctggatttttaaccaccccgccccctgttgcgccggttcttgcgtagagggtctgcaaaacatacccctgcacactcatgttttcggctgcagcagattggcggattattgcgcccatctccttggagggtcgaatcatgatattatcctgtcgtttgttatactctacgctcgctcgattatgtgcttcttttgtcgccatatatacacctattatagtatagtcggttaactgacattatgcatatttttccgtgatatatgtcggttaacgttggtcactttgcgaatagacacgttgtcggttaactgatatactcatgccatcgggaacaccggttctcacatccgaccattcacccaacgatttgaagagaggtacgcacatgagtatcaacgttttactgacccttgtcgagcagtacaaggaggccgcccaactgatcgaggctgcacaggctgaacaggaacagctgaaaacccagatccgcgaggcactggctgagcgctccaccaactatctggaagtaggctgccacaaagtccgcttgtccgatttctccagcacccgactggacagcaaagccatcaaggccgtagcacccgatctgtacgaccagtacagcaaaacggtcaccggcacccgcctgagcatcacctgaaaagagccccatacaacgaccaccgaccaaagttgacgttgtacagagcccaacacacccgccggggcgggctacaccaatattatacttgtcccggccttttttatcaagagaaaggaccgaaaaatcatgaaacagactgtcaaaacctcccgcgctgctggtcagctggaaaagatgttccgcgagctcaacaagcactactttgcaggcaagctgcccgagcccatcatcagcctgaaaaagaccccgtccgcctatggtcatatcacctgttccaaagtctggcaggcaggcggtgagaacaagtatgagatcaatatttcgtcggctacccttgaccgtcccatcgaggagaccgcttccaccctgctgcatgagatggtgcacgagtactgcatggaaaccggcatcaaggacaccagcaacaacggggtctaccataaccggcgttttaaggagcaggcagagacacacgggctgaccgtcgaccaccacgagaaatacggctggaccatcacgagcccgtccgaggagctgttggacttcatcatctttcaaggctggcaggatatccagatgggcgagcggctggcatgggcggatatggcgggcacaggtgcaggcagtacagcaccgggaagcagccagaccggagcgccgaaacctcccaaggcaaagagcagcacccggcggtgggtatgccccaagtgcggtaccatcatccggagcaccaaggacgtgcgggtcatctgtgcggactgcatggagctgttcgtgaaggctgactaatcacagcaagacagagagcgagggcacgagtgagagtagtgctatatataaaaacaggaggctcctcatggatacttataaaatcgctattgacacctttcttgccgagacatccgagtgcaaagccagtgggtgcgccgttttttccggggcagacatcgcattccaagacatccagttgcacacgcaccggaacaagtcagagctgcatttcatggccggacacaccatgctttctgtcccccttgccagcatcctgagtattgaaaagctggtattgcgggatatccagaccaccgagtatgagatcatcaccaaagagagcggcaccattacccttgacgttgtttaaaaatgcacccgtaaagacagagatccgccgagctgtgagaggacgcccattatttaaaggagagcagctatgaccattatatcagaacgtttgcagcatctgcgcctgacgcacggctatacccagaccgaccttgcccgaactatgggtgtgacccgccgggcagtctacgcatgggagcacgacaaatgccccgagattccccatctgatccagctcgcccaattctatcaggtgtcgaccgattatctgttggggttggccgagtgaggtactccccgccaccggaggacttaccggatactttttgcctacgacaacgcgacctttttaaaagcgcccttataagtccatcttatcggacgcatcgtttggtagacttcaggtacaacaaaagcaaacacacttcaaaatacaggaggaaactattatggcaggcgctttttcgttatttttagggttgttcggtcttggtgcggctggtgcagtcagcgcgggacagaacgcaaaaatcaagaaggcagattatcagtatggcgaggagcatggccttcatggcacctctgaggttctgcaaatgcgggagcgggtgcgtaaagaatggtggagtatctgcggcaagacctacaacgcatgtgaacggcctgcatcgagttacggcgacctcagcagaaccccgtggtgctatctgaaaaagcgctggttcattgaccacctgaacaaaaagggcattccttatgacgatctggtcgtggacgatgttaccggtgttaccttctacgagagccagaaaagaacgtcccaagcctatatgagaaagctgcggtaatagacatcgcgcccatcgtcaccacttctatcagcagcaggaggtaagcttatggctgaaaacaaatatgtgctcaaagcgctatctacatacacaggcaaggaaaacaccctataccagaaagagttcgatacccgtgagcgcgccgagatgtatcgggacatccttgagagcctgtcctgaagaaagcgcaagcggacaatccagtcttgccctatgtaacgtatgttatcgaggagcttccagagggatgatatcatgggaaagaaaccaaccggctatgcacgtcaaaaaataatcgtacagcacaaaacgtgggttccattcgatgaatggatctatcaacggaacgaggcaaattacaggtatgctgatgcggtgcgcagcaacatcggatatgcgttggaccagcagaagcaacaagaacgccacaaagcttttgtagaaaacgcaaaaaaacacaatattccgattccgaagaaaaagaaagagccatgggaggattgaccaactataaagcaacagagctctgccgctcagacacgagtagcagggctttttttacgcggtattcggtcaagaagtgaacttaaagagcggcgtttaatatcagacagcagatatcccggcggattttcgatttgattatgagtctccccgaaattgtgggggaacagtttcattcgaccacttttagtcaaacgttattggttttatagaacatggaggaccgctcatttttgagcatactcacttgtgcgcacggagaacatgtttgagcaccatctacatctgctcaaaattgagcatatctttctcttgatggggtcagtctaagcgacctcactccaatttaggccgttgccggtgcgtactgtttggcacagtgtcgtgtatagtgattctatcagcgcggaaaattgcgccttgatccgttgaattcgtttaccaatttggtaaatgaggttggaagtcacacgtagatacgtcttgactcactttcaagggtactcaaatcgagtacggttgatggtaagagaacggtagcacgtgaagttatctgatacagtttgcgtggtgtcatcgaaatctggcgctacaacaccaatcccaagaccaacgcccttatagaccgtatataccatagacaagtaccctgccaattcacgccgccgggcatccaaggtcgcatggaatctctgccccgagcgtgttcaggagttggctggctatctgctgaatggtcgcccctctgccgtgaccatgctcgagctgctctataatggtgtcgccctctatgacgatctctctattctgaaataaacatcggtgtacaaggggtacaaacaagataaaatagaaatgaggggcgatagagcggaaatgtcagattttccactctatctgaacacggtcgctggtggccttgattgtagagatcaaaccatcggcggcttttcttttgtcgtcaaaatctatactgtcccagttgtcgagataataggataacttctttatctgctggggagatatggtttcaacgctcaattcggcgattgcctttgaaatggtctggcgtcgggtgtccagttcttcaatttttttgttggcgtaggcaagcaaggtcgcattggctccggtcagtgtgtccagcagcttttcaatttctgcctccacctgtgccagctctacttgataggctgtcagcttcggattgaccttttcctctttgccgtggagtatctgaaaatctttgaacttctcctgcatggccgagaaaatgaattgctcaaattcttctttgcgaattttcccgcagcctggacagcctttgttttccgtccgtttggtacagcggaaatatccggtgctgtttggtacatgggtggctttcagagcatacccacaatgaccgcatttgatttttccggccagccaagtatttttcggtttccgtccctgctggaaggtggtatttgccataagttttttccggcatttcagccatgtgtcagaggaaatgagtgcttcgtggggagcgataacaagtatctggtcttttaagcacctgtccttgtcctctttcacatcccgcccctgatagagatagcagccgtttgttccagcaaagtcagaagcgtcattcacaatcgctgcaccctggctcttgaaaaattcgtacagttccaaatcggcctgtgcgtaaacggggtttcttaaaagctgggaaagaaatgtacggaacatggatttgccataaatttttatgtcatgttcctcgaagtatcgggtaatatctccgaaggaggtttccggttcagcgtacatttcaaacatcagccgaacatggtcggcggctacggggtcggcaaccattttctttgtgcggataccctctaccacagtaggctctaactgataaccgtatggcgcctgcccgctcatgtggaagcctttcaggcaccgggaatagtaggcgtctgtgacacgcttctgaattgtctcacgttcaagctgggcgaatacaatgcagatattcagcatggcccggcccatcggggtcgaagtatcaaacttttccgtggaggatacaaactccacatcgtactcttgaaacagctccatcatcgttgcaaagtccagaatagagcggcttatacggtccagcttgtacacgatgacccgccgaacctttcccttgcggatctcgcccagcagcttttgaaactccggtctgtccgtattcttaccggaataccctttgtccttgaatacccggcagctcccgcctttcaattcatacttgcaaaagtcgatctgactttcaatgctgatactgtccttgcggtctactgactgtcttgcgtaaatacaatcttctctgataaattccatattgggctcctttccttgttggaatggagctaccaaccttacaactatattataccatcagcagccccggacaacaatgttgcgaatgattagggaaatctgtccccatatttactgaacacctcgtaaagacaacgctcaatttcttttttgcgctgttctttctccttcgggggaagtaccggcgtgaggctttccagcacaatgatcttcccttgaaatgcgacagactttgtttctcgttcataagtgacagcttgcgtcattgaaaacctcctttgcgaaagtgcgtgtatatgccagcctttcccacttgtcccgtggggaaatgtcaaaagacggcacccagcaggtgccgccctttgagctttctccacttcgggtcaatgtggcccgaggtcagtaaggactggaaaggtacttttctttggcgtcctccacgctgttgaggtcgaatacttcataaagctgccccacaacacgccgtatatccttctttgaaaatccgcagtcctccattgccataatgacataaccacggcaggcgtcattgctccattcgtccggttccaagccggggatcattccaaacgcatttcccataaagtgctccttttttgaaaagatggggagccacgccggattggttggcctatcatcagacagcattgccgggggctccccataggttttcacttcatttcagacacaccggacgggcataggcttcatgccccatagtatttcaactctccccattctgatggcaaggcgttctcattgcctgcgacggctcacggcttgcaaggccgcttcaacgctcggactgtgactaaacgcaagtatccgggttctgcgcctgttccggtggagccagccttgccccacctatggcatggacctgttcgctcgctcagttttacaaagactgtattctctgaaatccgaggtcatggcgggtctgtcacacagcgcgttccccttcgtatccgggtgtctttttattcaattttcaatctgcatgaggcttgtctgaacctcgggccattgtgacccgaagtgttttgcctctcataagccatttcattttccggcctaaatcggtacgccttacaaagaatttttcaaaattttttctaagcgccgcagacctcgctcgatcctcctttatcgttcctcatggtttttatggctccgcttctggccgggctccttcgggggttcctgccctctggtttcatctttgagccgggcagtaatggatgggcgcacccggtcaggattgcccggtgctggtttcagctcataatcctccatctgcttttcggtcagcggctttgcgtaggtcagttcgccccatgccatcagcctgccgtctgccacaggacgccgcctgtcatcatcgtagttgacgatggaaagaggctggttatccggcggcttcgggtaagttcctatgtccacgggccgctggggggaataatagcggtaaacgccctccggtcccagctcggtatgcttgaccgccgcatggtaaaactgctgatagtcgtccacccggcggtcaaagtccctctgcgcccatgcctgactggttccatagcgaccccagtagtaatcccgatggccgttttccccctcggtaaactgccaggtcacaaaggggctcggcgctcccggattatgccccagcgcaaagccgtgtccggtttcaaaggtggcagctttcaaaatcacatatccttgtactgtctccaagagatccctcctttctgtgcctcgggccaacatgacccgaagtgctggatgttacgaaataagagggcagaccgtggaggaatgtaataagatattcccgccccggaaacaccctcaaaaaagcccggaatgtcaagcctttggaggcggcaaatcgtaacagccgcccggccttttctcccgcattttcctcatgcgttcccggctttttcggcggttcccttcggccttgcagacgtcggaacagtaggcttgacgcccctcgggcaaaaacgcctttccgcagaccgcacaggcccgcagctccggggagatgccttccgttgtcaacgacgcttgaagctccgggttaagaggcaggacagcctcacggaagtaacggcagtacgcccctgtccagcacttgtgcagcatataacaggcacagtccagaggaaggcacaggccgctttccctgtcatagttggcacacatccccgtgaccagagaacggattttcttcttctcgtcacgggtcagctcccgggcgtccatttatgacttcgggccacgatggcccgaagggcggggctccacgatcagcgcccggaacttcttccggcactgttttttctttcctttgcactccttgtaataacggcatcccttacaagggtcgtcattgtcccagccggggtgcggtacttccttcatcattcgttcaaaagggctgcttgtaaaattcattctcattcctccgtatcttcctcccacggcggggtatcttcgtcctcgggttcctctgcgatctcctccagctccccgtcctcatattcgcagtaatcatcttccaaatccggggcctcatgcttcggcttgtaaatcttgaaatagtaaccaatcccaccgccggccagcaccaccgcaccgatcaggagcagagagagaagggggctgtcctttttctccggctcgggttccggtacttcctccacaggttcggtgggctttggctctggctccggggtcacttctttgggcggttccttaccctgttcggcaagaggcagaagatcgtctgtggtaacggtattgaggaaatagacgttctcgctggttttctgtttgtcgatcaccagataaaacacactctcgtctgctgtggtgatggtgtagaactctttaccgtcctcgtcggtggcgttgtccaccacggttcccgtcccgtccggggtaaaggggttctgggtttccggctctgcttcggtttctgccggggagggagctgtctccggctgcggctcgctgctctgtgcataagccgggactgtaaagatcaggcaacacaaaaggctggcagccatcgccgccagcctgcggtatttaattttcttcatgggctgtgtcctccttttcgggtgccttcggcttcgggtcagtatggcccgaagtggtaaggctatttttggggtcattcagaaaagccataagctgggcgggcgtcagtttgagggagcgcaccgcctgcacgatctggctgttttcttcctcctgtttctgcttttccagctcccggattttggtctgccactcggcagccttctcccgggctttttccagttccttatcgagcttgtcgatcttgttcatgcaaggactcctttcctctggctcacaaacgcccgaaggcatagaaatgtgtctgccagtagcttgaattgatgtttgcgtattggatgggcgaaccacaatgaagcatcatcccgtcgcccacataaatccccacatgggacacagggccggggctgtcataggttcccgtgaaaaagataatgtcgccgggctttgcctcggagggggaaatgatagcgcactggttgtaaatgccctgcgctgtggtacggggcaggttgtggacgccgctggccgtgtacacccagcagacaaagcccgaacagtcgaaggaggtggacgggctggagccgccccacacatagggccagccgatgtactttgtggcttcttccatgagcgccgcaaaagccgggtcatccagtgcctcgccgggtatctcatagctggggccggtatcttcgccgccgttgtaaatcccttcccacagatagggcttgttgcctttgagctgctgcatgacggtgtagatttcccgctgctgttcgttaagcctcggcaggatcacggcaggcagcgttttgtttgttagggtcacatttaagatgtaatactcataggggacttcctcggtggtggtttccccggtctccgggtcggtgctggtttcggtacggtagcgtatctcgacttcctctgtcaaggtcagctcatactgtgcctcgaagatttctcgcagttcgtcctgcacctgttcccggaaatacacatggtactttgctgagagataggacgccagctcataggggttatggccgatctcgtccacggaatagcggtactcgtcatagccgggatgggtgctttcaatgttcgctaccgtctgcgccagctcgttttccagtgccgtgtagtcctcgtctacgcccagcaggtccgtatcctccgaggcgtaggaggtgccggataacgcattggcaaggccgctgccaagcgtggggaagatggagcttaccgccgacacaagaaaacagagcagcaacagcaggagcaggaccagcaccgccacgggatggcgggtcacaaactgcgccgcccgccgggtcgcagttcccgaagcggcagcggttttctttgcggcctttgcgccctgttttgcagccgcctttgcctctttggaataccggcgtttcagtttccatttctgctgcacacgggaaagcggattgctggtaagctccgggtgctcggaggccatcttttgaaaatccacattggcccgggcttttatgtccttccgttcccactttgccaccttccgggccgggtgttcctgccagcggcgtttggcatagcgggtcagtttccgggttccggcctctgcggccagctcggatttatgggctccttccacacccacattttcatgctcgacctcgtgtatcttgttgtggacatagaaccatgcttctgtacgggctccccggactgccttttttgcaagccccggcggcttcttcgctgcccgttttgcctcggtcttgtccagtttctcccgggcctttcccagctttcccccggcgtgttccgcttttgcctgtgctttctggtacttgtcctttttgctcccggccttctcggcggagccctccggctcctgtgccttgccggtatcctgcggcccgcccgcttcatcttcctgcctcatgcggtcagagggacggcttttccggctgtcctcttgaaacttgccgcttttggacttcgggccattgtggcccgaaggactgtcctgcccggtatcctcgtccttaaaccgcaggcgtcgggatggtgcgggggaaggcccttcccgttcagccggtccggggcgattgctcccggtatcctccgtcggccccggcctttgaaaattccgtttatccggtttctttccgatgatgtatccctcctttccaaacctcgggccatcatggcccgaagtgcgttatgcccggttcatttcctgttttttgtcctccgggcgggtggtcataatggcgtacagctcggtattctgcgggaagcggtcaacaaacgggatggtggtattcccgaagaacagcagcccttcgccggaattggtatgggtcacataggaaagctggtgggggctgatcccaagctgtttggctaaaatctgccggtccccctgtgcctgcgagagcagcacaaggaagtccgagttttcaaagatgttctcgatctccgggcttgccagaaaatccttcacgttctgcgttaaagcactgggaacgcaccctttttttcgcagcattttccagatcgccacacaatagcttgccgtcagacggtcacggagcagcacatgaaattcgtcgaagtagcaccatgtagcgataccgcgcaggaaattcatggacacctgcgagtttaccaagtcctgcataatgagcatggcaatcgtccgaagcccggcccccagcttttttaagtcaaggcataccagacggcggttcaggtccacattggtttcatggttgaacacgttaagggaacccgacacatagatttcaagggcagttgccagccgtaccgcctcgccctccggctgggaacagagcaggtcatacagggtttggagggtcggcattttgcttgtttccgggtcctgcaaatgttcccggtacatctggcgtacacagcggtcaatgacggtccgctccaccggctgcaagccatccttgccgccaacgatcagctccatcagcgacaggataaagtcggctttcagcgccatcgggttttcctcgtcaaagctcaggtcaatgtccatcggattgatgtggtgggggctgtccggggcgatctcgatgacctgtccgcccagccgcttgataaggggcgagtattcgcccatcgggtccaccacaatgatccggtcacgggtggcaaggaacacgttcacaagctcccgctttgcggcaaaggatttgccggagcccggcacgccgaggaacaggccgttggggtttttgagctttttccggtttgccatgatgacgttatgggaaagtgcgttgagcccgtaatagacggcttcgccatccatgcggagctcctgcgtcataaagggaacgaaaatggccgtggagctggtcgtcatgccgcgcttgatctcaatgccgttatggcccagcggaaggctggaaagaaaaccatcctcctgctggaagtccagccgcttcaaggtgcagttgtatttctggacgataccggacaccgtgaacaggtcattgtccagctcccggcgggtcggggccatgtttaccacaaggaaggtcagcaggaacattctttcattccggctctgtaaatcttccagaagggtctttgcgtcgttgctgtacgttacaaggtcgggcggaagtatgtccatgtcgtaccctgaccgagctgccttcttttgttcctccaccttcatcttgtcaatgtcggagactttggccttgatagattttacggcggcggcctgatcgacggtttggatatggagagtgatggtcatttccgcatccatttccaaaagctccgccagcagcttgtccgagagctctgaggccaaaatctgtaagtaggaggcagcgccccaagtcgtccccacccggaacagacggctgaaacgaaaatcgaaactgtccggggcgataaagtctttggtggaaagcccggttttggggatcatatcccacgaaaaccggaagggggagccgctgccggggtggagctgcccgtgaagaagctccagccgttccagccccgaaagggagcggcacttgacgcccagctttttgaagttcccgcaaatgtccgcctctacacgttccagccttgccctggcggtgggaaggtcgtccacattcacgccgaaggtcaggagctttgtgcggacaatgccgttgttgcttttggcgatctggttttccagcatttccacatactcacaccggacgctgttgtaatcatcgtcctgcatggggatgttcacgctgtaccggctgcccgggcggctccggtggttgaggaaggaaagctggaacggaaggctgctgtcaaagtagttgaggcaggcgctccacccgtcaaagatggctgcctgatcttcggactgtgcgagctggtagttgatgtcctcgtattcaatggttttggtgtaatagcggtccgctacccggcacaccccgtcccggtacatttcccggtaagggagggtctgctgggcggtggtgggaatgttctttcctttcgtgaacaggccggtaaggccctgcttttcaggctttctgcctgcgggctttccggcccttctgttgtttcgcaatcggctgcgcctcctttctggcgctaagcagcgcatagaagttttcggttttgtaaggccgcacccggggatagaggaaccgggtgcggatgatgtttttcagcactttttccagcggaaggccatcccgttcatacatagccagaaagaagaacgggagcatgaggccaatcatcaggaacatggcggcgctgttcccgatactgccacgggaaaacaggtaggccgggaggcccaccgccgccgcgctggaaaaacaaacaagctggcgcttcgttaggttgaaggccagctttgtcttgattttggaaaggtcttttggtactggcacataggccattttggtacacctcctttattgcttcgggccagcatggcccgaggttatcttgcggcctctttggccggggctgtgctgcgggcagcttcggcggcctctcgtccgctctgccttgcccgccagtattcggggtgatactgccggatggactgattgagtttttcttcaaactgtcctttgtccttaatgcggtcagggattttccacagctttttgtccagcagctcccggagcactacgctttcctgtgcgtcctcctcatagcagatatagcccttgtccttgaagccgcattttttggccgctggggagagaacggcggctacctcgtttgccaccatcgttccgccgtggctggcggtagataccagaaacacccccggacagagaacttcacagctctgcacctcgccccacggggagcttttcggcgcatggaacattccgcccgtccggttccggtccgcctgcatgagagccgccttttccaagatggccttcagctccggggaaaagtaggcgtattcccgcaggacacgggcggcgtccccgccgcaggcgttcatcaacagggtataggcatcgctgtccgctttggtacagcggcccagcagttttccgtcgtaatagcaggctgcgtcatagcccgtccgtttgcgtggcatggtttccgcctcctttctgcttcgggccagcatggcccgaggtcaacgctctgcgctgcggctgggcttttccttcggaggccgttctgcctttgcctgttcggcagccgcttttccggctttgagctggtcgctgatggacgcacgccccacagagccgcgctccgccatctgttccagctttgcctcataggcttgcagaacagcggtgttgagctgttcccggaactcctttgtgacagggtaggccatatcccggtagccgcctttgccgtccggctggctgggcatcccaagaaagaggcccttgctgccctgtacgattttcagattttccaccacaaagcagtcattgaatttcacgctggcaaagcccatcagatttttcacaggttcgatgacccgcacgcttacatccagcttcaacggtgcggccggggtggtgtttgcaaccttttcctgcatggtttcctcctttccggcgggaacaaggttcccgtccttgtagtcatagccttccgcccggagtgccgccagcgtgtccgccgatacgcacccggacagtttcagatcggtttccaccataaagcgcatggtgtctgctttagaaaattcttcggggagctttccatagaaagccgggtgcggctgtccgtccgcaccctgtttgtaacgccgaggcataccgcctcctttccgcttcgggtcagcatggcccgaagtctcttaatggcagccgaagatggattttgcaagactgcctgttttgaataaggtaaaacacagcagcaccgtatatcccacgcagccccagatcgccccgatggggtcgccgtcggtggcgatactctggatcagcaccgcatagatggcgacacagactaagatcaatagaccttgaaagcccaccgcaaagagggagcggaaatagttctgccccatgtgtccggtttccctgttggggactgtggcaaacgggataggcgctaaacttgtgagtaaataaatttcaatcatacggccatatacgatgacgaagatcacgatgtttaaggcaatcatggtaagctggatcaggaaggactggagccagagtccgaacagagggcctaactccatcgcctcaagctctgtccgcaaactgtccagcacatccggcgtgatctctgtcccgttctggataatgcccgctgactgctgtatcacatgctggctcacatcaaagaccgccagcacgatattgaaggtgttcgtcaggatcatcacagccacaaaggttttgaacacccacttaaaaaacatccatgtgtcaacttcatggaggttgttgcgttctatgagcatctgtatcagctcataagtcgttacaaaagtgaggatgaccccggcgattggcaggatggcagtttcagagatctgtcgtatcatggaaaagaccccggcgttccagtccgccggggtcgtgcctacctgtgtggcgatttcgccaacgctctgattgacgttatcgaaaaggccgtccagattccccatgataccatcgacgagcagacctttcagccattcaacgattgcgtcgatgataaagtccatatatcagctccttttctggaaaaagggacaacgggtgacatttagctgaacagcccggacagcagagggataagctgaaggccgatcagaacgacaccgccgcccgccatgagctgcttaatgccctggctttttgccgcagggttgtccgacccgtaaccttccagaaggttgatgacgccccataccgccagaccagcgccaagagccatgaccagaattttgagaatgtcgattgcctgattgaaaaattccatatacgttcctccattttgtttgtttgatggttttgggtacaaaaaaagccgcccacatcggcggcgcttcgggtcatcatggcccgaagttacacaaactcgtcgctgtccagatcatcgaaattcaacaggtcagcttcttcgtccgtgtcggagccgtccacttcgtacaccgtgtattcgtcctccggctttagtctcaatggccggtggcggaacaggctttccaagcggaaggcgtttttctttttatcaaattcggctgtgtacttgtaattcgggtgctttttcaagtcatacttcggggacaggaaaggcgggagccccctaagctgcaagatacatttatctccgggcatggtggtgatctcgctggtggtcatcagctcccggccaagccgctgcgtattctggctgtaactttcagactgtccacggcttctgccctcggtctgcatggagatggtggccttgcccagccagttttccgaaatatcctttagggtggaagcctcccggcctccgaggaacacgatactgtccatgtttcccatgatggtttcggaatggtctttgtacaatgccttgcactggctcattgcctgataaaaaagtgtcaggctgatctcacgggagcgtatgacggccacgatcttttccagccccggcacctgtccggtattggctgcctcgtcccacagcacccgcacatggtagggcagacgcccgccataggtgttgtcagcccgttcacacagaaggttgaacatctgcgaaaaagcgagggcaaccaaaaaattgtaggtggtgtccgtgtcgctgataagaaagaacagcgccgatttttcatcccccagcttatccagctccagctcgtcataagacatgatctcccgaagttggggaatatcaaagggagccagccttgcaccgcaggaaatcaagatgcttttggctgtcttgccgctggcgagcttgtatttcttatactgcctcacggcgaagtgctgggggctgcggcgttccagtccgtcaaacatatagtccaccgcgtttttgaaggtttcgtcatcctcccggacttccatgctgtttatcatttccaccagcgtattcatgttgcgttcttcctccggcccctcaaagacgatgtaggacacaagggcgcagtacaagagggtttctgcttttgtccagaactcgtcgccctccttgccgtcgcctttggtgttggcaatcagggcggtaacaaatttcaaaacatcgctttctgtcttgatataggccagcggattgtagtgcatggattttgaaaagtcgatactgttgaacacccgcaccctgtatttctcccgttgcagaaactgcccgcactggtcgagagtgccgcccttcgggtctaccaccacatacgaggaatgggcttgaaggagctgcggggtcaaccagaaccttgtctttcccgagccggacgatccgatgacacaggcgtttaggttccgggcattggcgggtatcttcggacgggtgttcatggtaaggaactccgtcccggtcagaatgacattgttctgaaatttagggtcaacaaatggctttatatcttcctttgttccaaagcgggcggtgccgtactccgcatcccgccggaattttttcgcctgcctgatctttgactgtatcagcagatacatcccagccgcaccggcaaggcccaccagcaggtcaatacctcccagccccggccagtaggtttcaaaggctttggggaaggtatcaagcatccccatgagctttgtcccgaagtctgtgccgggggcgatccggtaggccgtcccgattttggagaaaaaccagaacacaaagaggtacggcaggtttgggagcacatattttctgatcttgtcactcaacgtccgtccttcaccgcctctctggtccgctgcttttcctttgcctgcgtcctgatttgctccgtgaatttccgaagctgaccgaggatggaagccttgtcctgctctttgttcagcacctttgcgctgtacttctggaaggccgccgtgatagcgtccgcctgattggctttgaaaaacagcaggtaatgaccggggctcactttatggaaagcgtagtccacatggaactccttcgcgatccggtcaaaatcctttggagctcccacatagggcatggcacttttgccgccatagtggttcatcagcttttttacgctctggcgtccctgcggggtcagcgccttctggtggtgcttttgcagcgcccgaaccaccttgccaagagcggcagccagcacttttcctgtgagcttcgttgtcctgatcgaaagggcaaccgttttttggtttacttcttcctgcataaaacctcctttccgtcggggttcccgctatccgggaggcccccgtacaatctcggggaacagaaaacctcgggccaatgtggcccgaggcttaccgctcggcatctctgccggacggagctttcttttccggctccgtctggactttttcgtcctgttcccgcatggtctgcaagatagagggcttcttttgaagttgggagggcttttcgccggacagcggcttgatacattccagacggtcagccgcccggatggcgttgtccgtgagctgcctctgccatgctcccacgctgggagcccagcggaaaccgctgcttttcagctcggctcggatgtccgcgtcaggctttccgtcaaagaacacctgcaagcggttgtcctcccggttcatttccacacggcccccatcgaactcccagccggaaaattcctgctgtgcctgtttggaaagctgttcgatacgagcctttacccggcggatctccgcattgttgttggtaagctggtagctttcaaagggcctcgggtcgctccgccagcttgacgccatgcttgctttcagcttttcgatctggtccggcgacagcagcgcacagccgtccagcttgccatgcttgcggtaataggcgttgacctccttcataatgagctgggagcgttccagcccgtccagcttcttctggagcttttcaatcgctgccgggtcatcagcgctgatcccgcccatgccggtactgcgtatcttatccagcagtccttgaatataccgccattcctccatgttgctgtcccgggcccggttctgcttttccttctttcccaccgggaaattggcaggtccggcgatcatcacagagggaacccttgcgtcaatggcaaagccctggttcatgttttcggccagcttgcgggcgtaggtgaccagcagatggtcgatcttctcatggtacatggggtctacccgggatttctgctgttccgctatggcggcggccttgtccaccattgcccggtattccgccgttgcgctcccttccttgtagtcggaaaagctgttcatttcttttgcccggcgggcggctccttcattgatagggtaatagttgatggtatgcacctcctttatgcttcgggccatgctggcccgaagtcttaccgttcttcatgagaaggccccgccttgtcctttttcggagcgggtggggcttcttgaaaccgtttgagtgtagcgagaatggagtggacaggctcggccttttcaggataggcaaatatccggtgttccggcggaatgtcctgcggcccgtggtaatactccttgaagccctccgggactgccgacacatacccaccgggagcgaatacgccgccctcgttgatacgcacatcccgcccatatgcctcataatcgaagtagttctgaatgtgctccggtatgtcgatagtcccaagctcgtcggcgtaaagacggcccagcccttcatcatcggaaatatccgggtaaaagcggtaaaggtcaaggttctgcgtcaggtttatcaaatccttcacgctccttgtgtggtttcccaagacaagagcggcttcaaaggtttccagtccgcccttatcccgtacttccagcagggcgtggcccagctcgttcagctcgtcgatgttctcacattcgtagagataatcgtagagccccagcacatcactgtcaaagctggtaaagaacacttcgctgtaccgtttcccgtctatcccgattttggcaagggcggcctgcaactcctgtgtcgtcatggggaaatgtaccgttgtccctacctcaatccccattaaggggtatagggctgtattggttatataggcttcaaacatgggctcattcctcctttccggcccggtcagccagcacctcataaatcccggccataatgtaatcggcgcaagggagggcaatcgcgtttcccagtgccttgtagcgttgcagaggccggatctccacgccgtccgccccgtactttgtccagccctctggcagccccatcagccgttcgctttccgtttccgtcagaaaacggatacagccgcccttcgggtcgccctcataccagaaggcaaagggcgttacatcactggctaaaagagtgggaaaagggtcagttggtaatccgaagctgtttcggaaggccgtttcttcctgcctttttgccgctccccgcatacggaagcactgaaaggggtggatgactggtatctgccgccctgtttcaaaagaagctgttcgatctccttcggcggcggcccgcccgccctctccgcaaggcggaggaagtgggagcattggacggggcttaaatagtatgtctgcggcacgtctgcctccaaaatccgccacgacgaaaatccgctgccttcgtgccagccttcgggagcctgcccaatactgggcgtccatgagccgccagcacacatcaggcgttccccctcgcaccattccggcgtttccccatcttcccgaaggaggcattggaacttcggtgtccgagaaggcggataggacggctctaaagtccatccggtcatttgtagaaaacgctcccatgacgttttcccaaacagcgatagctggatataggttatcagtagcatccctcatttcctgtatgatacgaaacgcctgatagaacaggcttgattttgccccagcaaggccggagcggttgccgatcagagaaaggttctgacagggggaaccgaaggtaattatatggacaggtgggattttcccgccgtccaccttcgtaatatcccccaaatgcaccatgtcgggaaagtgccttttggttatggagatgggcgctttttcaatctcactggcccataccggacggataccgcaccgggaagcagccagagggaacacgccaagcccgtcgaaaaggcttcccagcttaatgtccggcatggcccggggtgccgtgtcccttcacggcaagcaccccttccagtgtggtcgccgcaatgcccagccgcccggcaaccgcaatatcattttttacatcctcgtccacagcgctgccgcagacaatcagggtgtgggagcgccgcagcatatcccggcgcatatcaatcccggccttgtgttcctcgggaacgctgtcattcaaaaacagcggcagatacaagagcgggcagatcggggaaaagcccgcctcataagcaagacggcagtagtgggccgccagctccatatcaacatccggctcgccgctccatgcggcggtcaggtatgctaaaggtcgtttcattggttgagcctccatttctgttttggtttagggaaaagcaagagttcgcccaacccctccgccccttcccccgggaaggggaacggctctggagaatttatatccccgtcgcttgaccgagaaaaagcataaccgggagaaatccgtcaagggtgcctctggcaccgcctgcggcggcgctgcccttgactgattttcccggatatgctacggaataactggcgacggggaataatttatatctccagagcttcggggcgcggggcagagccccgcaatcctcgggccatgctgacccgaagtttgggcttacttttcctgttcggttttcttctccggcttttcatgttccttctgctgacccttccagtcgtccagcagcttgatgatctggtccttcatttccctcggcgtagtttccttgccgaaatacttgctcagttccgcacctgtcaaaatcactttgtctacctcctttttgtcctccatcataatgccgtcgatcacatccccgttgagcagcttcttttcgtccaactcacgcatacgctttgcctgcgcctgtgaaggcgaggactgctggctgtcaatggcgacggcgatatagttctggttcttcttgccgatataggaaagctccaccgccgtagtaaaacccagctttttttcatccatcagcttcatcaggtcgggaaccagttcattgagccggatataccgctgcacctgtttgacggccatcttattgcgctcggccacgatctcgttggagcgtttgccagcgtccttcgggtcaatttggcccgaagtgcgggagccctggtgcttgatagcctcaagctgcattttcaaggctttggcccgctcactgggtaggatttcttcacgctggttgagattgtcctcgaccatctgggtgatggcttcatcgtctgtcaggtttcggacgatacagggcatatccgcatatccggcaagctcactggctttctggcggcggtggccggacacgatctcatagccgccatcctcacggggacggacaatagcgggctgggtcacgcccttgtccttgacgctggacaccatagctcgcatttcttcatcatcccggacctcaaagggatggttcttaaaggcgtggagttcgttcagcttgatatagacgatctgctccttgccccggcgtggtgcatccttcggcttttcggattccttcggagcgggagcggcctgtaccgttggagccgtttttttctccggttcctttttgaccgccttttccggtttctgtgcaggagctttgggcttcggggctgcggccttgtccttatcttctttcgggggacggccccggcgcttcggctgttccggctctttgggtttttcctccgctttcttcggagcctccggctgcttttccggtttctccgcttttgccgggtcaggcttttccccgccgggagctgccgcccgttcctcggctttcttttccttcataatttcagcgaagttatagacagaaacctgtgggttctttacctccggttccgtctttttttccggctccggagaaacggaaaccttctccggctcttttgggggagcgggaggcgtttccttgcccggcccgctatccgttaccggctgttccggcgtttttgtggttttatcatctgccataagcatttacctcctgttttttggcatgaaaaaagaggctcaacttttcagtcaagcccccgtgggaagttcctcctttctccgccatgatacaaaaataccgcccgtagtctcgtttgggcggtactttgtgtaagattggcagtccattattaagttttttattatgttccctttgtacaccgttgcaaacgtctttcaatagcaacaccccgctactctatgtcgagcagtggggcgtttttgcgtcttgatgaggtttcaactaccgtcaaaatgacgggtgttgaggatcatcacgaaatatcaacttcctatctgagcgctattgaacttttaccgatttggataatgttcattgatcgtatcatcgatagaatatggatttcggcagtcactttgtcctctgagcttttccaaccgtaatcattttgataacagttcatcgacactcaacttgaggggtgagcttctgaatgccgaacaatttgttcgatgttgtataggcattgtcttgaatggtccatttttgacagcccaaatttccgccatcaaacggtgtccacagtgtaggcgcccttgtattatacggtaacacgatatattccgttcgaggtatactttttaattgtatcaatccagatagaatcacaccgcagcagacgtttttctcaaccatttgagatatttcactatgatcgaatcaatggtgggtttccctcttctcccaccccctcatcttagtcattgctatttccattggctcaccatcgacctcggcaatagcggcttccgttctgcgttggagcatctcggcgtgaagggtatttagcgggcagaggcatagaacccggcctatggtcgtttttttcagcatctcatcaacgcgccagctcaccagcttcttaatgataaattcgttcttgccacgtccggttcccatatccagaagaactcttccgttcccccaatgctggaatgcatcaccgatcaattctgaagcatacgcccaccgctccttctccgccggggcgtcctctcctgtctgtcccaatggcacgatcgcttctgcaggcaccacttctacctctggcactttctctgcctcctgaacggcacagcacccttcctgcagctcggcaggccttggcgtctgtggactggatgttccctctgcctctgcttccagctctgctgcctgtctggtgggctctgccccttgttgcataagcgtctccgctgcagttgcctccggtgctattaccccttgtgcagtcgcgttcacagcctccttctccggtgctgtcagggctcctatcgcatctggcacatcatatccttctgtagcgtctgggacgttgtctagcaccgtgtctgcagcgctctctggcgcgtcccccgatacatcacccggcacactatccacgcccggcggagcatccaccgcctcatccaatacagcgccctgtggggtgtctggcgcactctctggctctatggcgcagggcatatccccggcggcttgctctgtgtcgcacgtggctgccttctgtgcctccagctccgcccgtctctcctccggcgtcatcttgttccagcgcaggaacttacctatctcttcttgcgactcctgcattgtcatttttttagggtccttggagcaatggaattccagttcctcctcgggtagctgcttttcctcctcacactccttcaggtagtcctcatattcatgggttccgttcttttcatcggacagcttcaggaaaaaaccgccaaatggccaatgtgtctttttatcactcatatattgatgtttctcctataaaaatataaggcgcacagcccagccatcttgccagaccatgcgccggtttgtcagcacctgccagaaaaaactctggtcaaacgcttcgttctgtgctccagtgctgacgcagatatatgcgaccttcataatacaaactcactggttgatatgaaaaatagggtcagagatgccagaaatcattgaaaacaatgccaaaactgaccctaaattatagcggacagactgaaattgggataatagataaggtgcactccaaattaaaagtactgcgtaacggaaatgctgatattggggtattcattgtctccgtttgcgagtggagtggcttcaagatttacgatgtcattgtcgtaaaaatcaaccttacactgatatctatcacaggaaacggcgacagattgctctatatccgttccggcacaaatcgtaggccagccattgtcatggtcaaaagaaaccgcctccgatggtacaggaacctcatagcatacataagggttcgtgctgatgagcgaaaaccacacgcgaggaaagcgcttgatgacacaaaagagctgctcggcggtcaaaactgtaattacatcagaggtagtgctagtagtcataataattctcctttttagtttactttcaaaaagcatccaccgtgacagtgttgccttctttggtgctgatttcgtattcgatggtgtgtatatccgggaatgtctggccttttttagttggcctttataagcagctccatacagtcgcgcaggtgatgcggtcgtaagcaggctgcgttttcttcagcctgatgatggtctcttggaactcccccttgaaacagtgctggttaaacacacgaggcatcttctcaagctgtccagcggcgcggctagtcttcgcgttctgcttcatggcgttttctctcctttagacgtcaagattgaaaaaagaagggatagatggtataataatttcatcccggtgagctagctctatgggtggcggatgctactgaaagggcaggcgtgtaatgatggggtggtgcatgggatgagcctcctgttttaaagttgaatgtttaacagctctgggaaaagagtggagctgtctggatgtatctagattatcacgataccgtgctcatatcaagcactatatcgtgttttctctgttttgctatgttttcaatgagataagcggctttagttgagcagtttcacgatatgctaatccgcggcacgatatacggaggtttccatggcatataccgaagcaaaaaaaataagtaatcagaagagcgatgccaaatattcccagatcttgctgaaaccctacaaggacgaggctgcacgcataaagaaatgtgctgcggacgagggaatgagcacacaaggctatattttgcaggctgtccgcaagcagatggacgaccaacctatgcccggggtagttatgaattccgaaagtgaacatctgactgccgaaaagcccagttgttccatctccccagcactgaagcgtgcgctcaagaaaagcattcaggacgcagtacagaatttcccggaggaggaatacgataagctgcggtatgaactggacaagctgattcatgagaccttctctgatgaagccagaaagcctaaaaaagccgctattgcacaggaagaagcagaagaaacacagaaacccactaagccgcttacctgtaaatctctcctctgaaaaaacaagcctctgcctttttacgggcaggggcttttgtgttgcttgagtttgaaataaacatcgtgggtacgaaaaatttcagatcggatgtttgatgtgcctgtcagcaaaattaacgatgccgcattgtgaaaagcagcgaaacatcgatgacaatttgttccaaatcgatcaaagcaaccagacaaatgatgccgtatcatgaatgagcgttgcaaatttcggatagctgttacattaaagttgtatttttgattttactcccccttccccatcttgatcttatctccgtggcgattttggcgggtcagctgctctagggggttcagggcgtcatagttggctctcaggtcgtccgcatatagtgccacataccgccgggtcatggtgaggtcagcgtgtcccagcagcttttgcagacggaacggatcgccgccagcttggatatacaatttggcgtaggtatgccggaacaggtgcatagaggtcttctccacgcctctgctatgattataattccaaatcgcattcccgagcgaattcaaagtcatccggttgccatactccgagacaaacaacgggtctgtagggtcgctggtacgatgctccagatactcctccatgatcttgaccagtgccttagagagcggcacgatttgctgattacgcgccttcatgtggcggaaaaatactgtcccggcggaaaggtccaagtctccgatctgcaggttgagcagcgtggacgcacggcagccggtaccaagcaggaaattgacaatgacccaattgcggtattcggcaaaggagcaggtcttgcagtccggttccttcaatagcttctgcagttcgtcagtggtgtagggttccttgatcggatcatcggcacgcaccagtctgataggatacttttccagatagcctttttccatgcaccagtacaaaaacgcacgcaccatacggaggttcgtattgatggtcgtatcgtgaagctgctggtccttcatatagaagatatagtcctccaccgtttcctctgtgatggtatgaatgggctgttccgtatcccccagaaaccgaaagaagctcctaccctttgcggcgtagaagtcgagcgagccttgggagaggttcttgagccggttgtacttttggaacctttcaaaggcctgttggatggtaggatttgccttggcagcgggtcttaaatcacggttacgcacgagagagactcctccttttttcgcgaaaaatccctctcgcccgctcaacacttccagaaaatggaataaaaagaaaaagcccagaaattcgaatcaacgaacaattctgagcttttacatgccgccgacgggggtcgaacccgtactctgtctccagaaagggattttaagtccctcgtgtctgccaatttcaccacagcggcgcaaacccggcttacaaagccctgctgccctctggcttaggagggaaccgggaataacaggtgtgaggtaaaatgtcatccaaatgacttgccgtcacttgaagtaacatgaaattcagcgatatttatgatacaatagtttccgtactttgtcaagaaaaaacgcttattcggtgctgcttacaccttgccgccgtgcagctcggcgtacatccgggagcggcactcggccactgcgggggtcatattgacgtagtgcttgtgggggcactccagacgcagctcgctctcccaagtttcctcggtgagctgctttgcaatataggccttcttctccgcaatagagggcagttcaatggccagcttaccgcccagaatatgcggcaccagcagcggacgcacagcggtgggggtaaaggtgatggtgcgctcgatggcgtccgagtccagattgaccatggtgaccggcttaccggcctcgatgacctcgccgtccatggcaatcaggtcacactgcgcctgaccgttttcgtcgtacagacgccacggcatctttttgcccgggatgatggccttgctggcagaatccgagcacttcatcttgggggtgtagctgccgtccggctttttcactgccaccagcttgtacacgccgccgaacacagggtcggaggcagaggtgatgaggttttcgcccacgccgtaggagtcgaagtgtgcgtgctcgtacagctccatattggcgatctttttctcgtccagaccgttggaggccaccagcttgatgtagggcttgccggcggcatccagtgccttgcgcagccgcttggagccgcgggcaaggtcaccagagtcgatgcgggcgctcttgacgcggcggttggggtcgttggggtatttctcaatgagataatcgtccagcttgatcaggttgggcaggccgctttccataatattataggtatccagcagcaggctgaccgaatccgggtaggtatcagcaaaggccttgaacgcatcgaactcggtggggaaaaactcgataaagctgtgcgccacggtgcccacggccttgacctctgcgccgaacttcatctcggccagacagttggccgtgccgatgcagccgcccagcactgcggcgtaagcaccatcgttaccagcgctctcgccctgtgcgcggcgggtgccgaactccatgacgctgcgaggggtgtgggtgttcaggccggtaacgcgggtggccttggtggcgatcaggctatggaagttcatggtctgcagcaggtaggtctcgatgaggatcgcgcctaccagatcgcactcgatgcgcaccatctgtacatgggggtagcagaccgtgccttcgggcagggcgtacatatcgccctgccacttgtaggtgcgcagatactcgcagaactcctcgctcatgcccttggtgcgcagccagtggatgtcctgctcattgaagtgatagtccagcaaaaagcgggtcagcttgcgctggcctgcgctgatggaatagccctgattatccgggtttttacggaagaacatatcaaacaccagcgtggtatccttaaaaccatgcaggaacaggcagtttgccatggtgaattcgtaaaagtccaccaccatcgcggggttatcgtagtcctcatcggggatataaggctcaaccttgatctcgttcatgaatgttttcctctctatttatacccggcgtcagctcttccctactgcgcgccgcctgccgcttgcccggcagggggatctgccgccctgtcatgacagagcgtttctatcatgatagcacgatttccctgcctgtgcaagtattttcgcgcaaaaagaccgctgcacaaacgctgtgcagcggtctctgcgcttataacaaataaatcaggctcagccgttcataatgctgggggtggcgttcttcagcacaacgtcgtggctgccgccctccacgatggaggtggaggaaacaacggtcagcttggccttctgctgcagttcggggatggacagagcgccgcagttgcacatggtgctcttgaccttatacaaggtggtctgcacgccgtccgccagagggcctgcgtagggcacatagctgtccacgccctcctcaaagctcagcttggtggagccgcccagatcgtagcgctgccagttgcgggcacggttggagccttcgccccagtactccttcatatactggccgttgatgcgcaccttgttcgtggggctctcgtcaaagcgggcaaagtagcggcccagcatcacaaagtctgcgcccatagccagcgcgagggtaatgtggtagtcatggacgatgccgccgtcggagcagatgggcacatagatgccggtctccttgtagtactcatcgcgtgccttggcaacctcgataacagcggtagcctgaccacggccaatgcccttggtctcgcgggtgatgcagatggagccgccgccgatgccgatcttcacaaagtctgcaccagcctcagccaggaagcggaagccctcggcgtccaccacgttgccggcacccaccttgacagtgtcgccgtagtgctcgcggatccagccgatggtgcggctctgccactcggagtagccctcggaggagtcgatgcacagcacatccacaccggcctctaccagtgcgggcacgcgctgagcgtagtcgcgggtgttgatgccggcacccacaacgtagctcttgttcttatccagcagctcgttgacgtttgccttgtgggagtcgtagtccttgcggaacaccatatacaccagattgccctcggcatccaccagcggcagggtgttgatcttgttgtcccagatgatgttgttgcagtcgtgcagggaggtgttggccggagcagtgaccagcttttcaacgggggtcataaaggtggtgacgcaggcatcgtccggggtgtggttgatgcggtaatcgcgggaggccacgatgcccagcagcttgccgcccggagtgccgtcggcagtgatggcgatggtggagtgaccggtgcgtgccttcagttccagcacgtcatgcagggtggcagtgggagccagattggaatcggacaccacatagccggccttgaagctcttgacgcggcgcaccatggcggcctcgttctcgatgctctgagagccatagataaaggaaacgccgccctgacgagccagtgcaatggccagcttatcgccggagaccgactgcatgatggcgctgatcatggggatattcatctgcagcgggcactcctcctgccccttgcggtacttgaccagcggggtcttcaggctgaccgccgtaggcacattctccgcagaggaatagccggggaccagcaggtactcgccaaaggtgcgggagggttcttcgtagaaataagccataatcaaactccttttctcttagggtgtatctgaaaagtcgaaaatttagcctatttctacaagcacagctggattttgcgttaaacagccttgaaatccacaaaggattcctgcggctatttgccttaaatcctgcttgtgcttgcgaaatattcgtcattttctttgtttccagatacacctttaacgcatccgataaagatcagcatcaaaatccttcatgtttgctgcctataaattgattgtatatactttaccacaaagcccgcaagaatacaaacccctgccgcgccaaactttataattgtcctttgcggaaaaacagacaaattgccaagcgttttcccgcattggtcatactttgatttttgaagtatcacttttgcaggcaaatcagagcttacagaatgcaaaaaagctcgtccggaacaccggacgagcccttttgcacacgaagcgggacactgcctgtgcggcgcatggatcatagctgtgaaggagaacagccggaggaggaggatccgcgcccagtatcccaaaaaacaagaagaaaaagatttcacacacagccttggggctttgcccttgctgtaaccatattgtaactcttttgaaaccattttgcaatagggtattgtaatttttttgtaatttttacactttgcacatattttcgcttgggttattgttcacttttgtattcataacgataattcgttatttttcttcttcttgcttttctaccgctctttattgcacgctcgtctagttcatattctattatattatgtcataccagatttgaaaaagtggtgtagtaattggtgtagtaaaaattgtccaatttataggaagttgacaatttattcttataaagtatataaaattactgaattatctttcggaactccgcaactgctttttcagcatccacatgactataaacatctaatgtcatattgactttactgtgtcccatcacatactggacagctttaatgttcatcccagattctaccattctggtgcagaacatatgccttaaagtatgaggtgtgattgcagttggaagttgctcttgcggattaaccttattgtatctctttatagcttgtcgcacatttgattcaacactaactgctgaacgagggctgtttttgtaactgacttgtagaaagccacaatatccacttatgctcggctcttcatccagctgtggtcttgtactcataatgtgtgaaaatgcttctctggctttttgcgacattggtatgatgcgtacaccactttttgtttttggagattggattgagaactctccatgaaggtatacaagctggtgattcacatttataattccatgctctaaatcaatatcacttacggttaatccacaaaactcactaacacgaagtccggtctcatataagattataagttcatcaacgtgctgactgagatagatatcttttttgcagaaatcaacaagacttgaaaattgttcattcgacagaatagtttttgtcctgttttcttttggcacaacttttgaaagtcgaaagctaaaaggattccttgacaaaattttatcatcgcaagcaagttcaaaggccggtcgtagtattcctttatagttatttattgtaccataacagtaccccttatcatatagttctttcatgaacacttttgcttctgtcggtgttattgatgcgattgttttattggcaaaagtacacccagaaaggattttcatgaaagtgtctatgttctttgttgttgtctcctttaaagacggcttatgaagatcggaatatttttttacgagctctttcaccgtcattgagtttgctattgggtcgatgccttgtatttcatactctgttaaactttcaatccttgctcttaattcttttaagtcgccagaataaatagtgcggcgctttccaaacttatctgtccaacgatactggtacagaccatctttacgttgcgactcaccctctttcaaaacacgtcctttattatcttttcttctttccataataagctccttacgttaaataaagagctccgatgtgacaatttgattatatcacatcggagccatacattcaaatggaatatgtttgttctatgtatctttcaaatgcttttcgtttaacaagttgctttttaccaacaaacattataaatgggcaatttctatcttggagaagttcgcgtattttacattgtccaatatttgaataagccgcagcttcttcgattgtcaatgtcgtcttttcccaaattgggacttcattcatccaatcacctcttccatcttatgttccccatatttagccacacatacattatataagagcatggcacgggtcataagaccaaccccaccgatacgaggagttactttgatatctttcatgtcataaacagcgtcagcgcagtcaccgtgctgcttgccattctcgtcataattgataccaacatctatgcagacatctacgttaaacaaatctaacggcgaaataaaatcgcgttccccaaccgcagaaatgacaacatctacaagaccgtcgtggagagcgtaataacgaagagcgtttccgctgctattcacagagatcacattacagtgccgtttaatcagcatatcgaccagcggacgacctacgatatcagactgaccacacacaagcacattcttgccatccagatcgtaaccgatggagtcaaaaatcttcataacacccagtggagtgcacggctgaaatggagatgtagatttaaaaccatcaacatcaaccgcgtctggaatgcagatatttttgggattgatatgttttggcagtggaagctggacgatgataccgtccacatcttcccaattataatcttccagtatcttgttatttaattcatcctccgtaatatcttttggcagcttgataagttccgctttaataccaacatcttcacagtcgcgcagtttaccacgaatataagcgttggacgctggattatcccctacttgataaatatgtaaaacaggagcgcagtcttcttttttgatgatatttttgattttatttttcatatcttgcgcaatagatttacaatcaataatcattgtgaacctcctttatattaagaatccaagttttataagattacgagtatctgtagcaattccaaacttcatcggatttattgtaagtatcatctgggtgcatcccaattttcaaagccaactgatttgatgccacattatcttttcgagttatccacaatagcggtttattatcaaaatcggatctgtgagctgtataccatttaattgccgattgtgcaagattcaatgcatatccatgtcctcgatagtttttatcgtttcttgttgcaaccgctacatctatatatgaccattcttcaaacagatcaaaaaacgcaacaggagtattttcattgatttttaagaatctttttataacatgttctccagctggaattgttagatattcattgttgtaaacaccaagcatccgctgttcttctgaagatagtgttttaacgatgtcatctacaagtggttttgtttttgccgcagattttgctctttgtacataaatattattttcgctcattataaaaccctaattctttggtcattttattacctcactgtgctaactccgttattcttaatctgccctttctgtgcatggataatcacagagtctgcattgacaatactggtcgatttatattcgatatacggagtattactatcgtatacaatctgtacatggcctttgatattcatgtatgtgccattacaaagaactgtaagcatctcataattttctgctggaatattggataccgtagtggatgtatatccgtagatgcccgattccagttcttcaatagtagcagtccattcaatcgggttgtactggcgatagatttcttctccaatcgtccatacaaaatatccaacaataagagtaatgagtacaccgactgtcaaaaacaagatcttttctccaagagtgagttttttgttattatcatccaagtccaacaccaccttcgtttacaatatagataccgttgtctttaagatattctataaattcttcatgtggcaacttatcggcaagctcacaaatagtgtagttacttttgcctttcacccactttgtttctttacgcaagcaagaccattgatgtacacgaaattccttgcaacgccattttaaatgaaatgaatctgcacataaatcgcaaattggtatctctacataaaagttccccggatagtgttttcgtcgccaccactccatgtcatagaatacaataccatagagttcaggataatcttcaaacccatgttctctaaggtaagcaaaacccaatccattgatggtccattctggcgacctcggaactgtatatcgaagctgcgattctgtatgcgagatacaggcgttgttatattttccgtcgatgcccataatataccagtcggatttataatagcctatttgcttagtcatatttcttttcaccagttgtatctctatatccacaatcaactaatgcgtcgcagtagattttaagagattctttgtttgaacatactctattccaagcacggccatacccatcttcacgctcataatcacgtgccacaatcataaaatcatctacgacataaaaactcccgcgttcaatcataatttaccacctcataaaagtctagttcttaaaaaataagattacgctgatatttatttaaaacatattgcatttcttctacaatatcaataacagcgcactctgctttatctttttgatattcttttacagaatcaacatcaatgtcaatattgattacatcattatggtatggttctccggtcaaatcaataccataggtgatctcatcaaatggagctttgtaccattctccagtattaccgtctgtgaatccaaatgtcagttcagtattctcgtcgtatccgatttcgtttaatttgttgataagctctacaattttcatctcttacaccatccttcgattctctcacacgctctgcaaattgcgtcaaaaaaatcaactctcgcctgcatcagaaacagtttaaagtacactctccgtttctttgcgagccaccagtcgttgtttatattctttgtttgcgattcgttcttgctcatgcaattcaagtcctttcaaccagtaagatggacattcataaattttttcaagtgtgtttgcatcgcaaaagtattctcgatctctcttattgtaatcgtaatatccaataaacgacaaaccgtaatcgcttattacaacgttgtcttttaaaggtatcggacgttcatcacagaccttgacccaaccgaggaaatcttcgcaagattcggcgcagctatctcttgtttgcttcctaaaagcgcatacttctttatgtagacatttactgcaaatagccattctttctcgctttccagcagaaatattctgcccaatcataaaatagttttggaacgtcacgcatacaagaaacaattttctgaagtaaggtgtcactagacttgtctttatgaggttctttatgaatacattcccatttatactcccagagttcaactgtattatcgtcttgtgtgctaattttcactacaatagaatgaagcttgtcgtttacacttacggaagcatgacaattttcttgtttgagaggccactcatttatttttgcaaataaattaaatgccctatcgactgccatttcgaataattgttgttcatcagagctcatacatattcgttctatatccccatcatgcagaagatttagttcccaaacttccattatgttcaccacactttaaaacatacatttttaaaaataagcttgctttggcatattatttttctttatcgcaaattctgcaataccgatgaaacggagattcgataatctgccaaaatataggtttccacttgtgtttattaaagatacggctgttctccataatatcaaccggataagaactagaatcacattcaggacagttgtatttcaaatcacaataattggctggcttgaactctccaagagaatctgcatcaacccaaaactcgcaaccgcagctagaacatctaaactctactgagtattttgttttttctctttctttaccatggacttcaattcgtatagccatttggcacctcaatccacaaaaatcttttctcttggaactgcagataaacaagatgaaacttctgtgttgcattctgggcaaatcgcctgtttaaccggtgagtattcagtccaatcaaattcttttggaattttcgtatcttcttcatcagcccaaaatacgcatccacatttacaaaggaatttaacggcatatcttgttttctttcgctcatgtttgtgttcaataatcttaatcgccatctggcacctccacggtaaaaatagttttagttgcttctttccaagaaataaactcagccccagcaacttccgctctacatctatagcacgcaatcacattattctcaggaatatccaaatcaggattttcaaaagaagttactcgaatcttagttgtgcaaccgcagttcttacaaggaaacacgattactggatttttcaaactatcagtcttgtgcataatgatttttattcctcccacccacccataaaacatatttactctaattgctcaagtgcatatatcaaatacaaaattaaagtctttgtcttttcttttgtaagtgttgcagagctcaattccatatctggagcatcactataatatgcaagttcaacagagccattcgagactcttacgccaatatctacgttgtaaattccgtctgtcgcttgcaggaaaccgatttcattcccctccataaatcctccgtaaaatttaccttttaccagaatgaatattttgttctaatagaaggagtttctacactttttgcaggattttccagcattgcggcctttgccgtgatttcatcaatactcttttggaaagcctgtagtttcttcaattcgctttcgatgtccagctttacttcgacattctcgataaatcccatatcttcaagacatttgcagtagccagcaatctcgttataaaaaatatggtcatattcttccagtagagtgtgctcatcaaacagttttacctgccaagcgatttcaaacggagcttctttatcggcatgagattcgacagtgtaatacttcattatgtattctccttacttaatgccgtacttagctttaaccctcttcagaacgtcagccttctcggaatagcaatcacgagctgcatgataatcactcatcttctcggccagaatgcgctttgcttcaccttcagcaacatcagcttctgccagctccttattcagctgatatccgcttgctttaattccatcaacaaaaccgtcaatgcgatcattcggtacagacttctcacctactgcgccagtttcagtattaaacatctttacaatagaatcttcagtgcctgcaatagaataaacataaaaatacttagccataattatttctccttcacttagtctttaatactgtatttgggctttacatcattgaactcattaagagcattacaatatttttcatttgcatggacatacatggtgtaggcatcctctttatctctctgactggtgagtaattttgtatgcgcatcaaaaagatccgcgccagcctttacaaaaccaacttgttcaagtccatcgcaaaatcctcgtgcatagtctccctcaccaatagagaatgtaacagcatcattgttttcatcaacaataagaacccgccaactatcgcaataataatatttcatagtatcctcactttccagaactcccaaaccctccggcaccacgcccagtttcatccaattcggaaacttcttcaaaatcagcctgccagaacggaacaaccgccatttgagcaatgcgatcaccgtgagtaatcatttgagggatgttagaatgattatgtagtgctacaatatactctccacggtaatcctgatcgcaaatgccagttttgtttgcaggagcaagtcccagcttagttgccaaaccgctgcgagcatagatagcgacataccaaccttccggcggagccatccgtaaaccagtatgtaccttaacggtctcatgcggctgaatcataatgcagcgatcaccattcttgtttaccatcgttgcgtcatcaaaaccgatataggcataaaggtctgcgcaagcagcatttttagaaccataagtcggcagatgagcatcttcgtgcagtttattgattttaatgtttggatggtaaatagtagtaaaagaatcgcaatccgggaacttttcgtaatttcctaaatccatattatttccctttcttatcttctggagtccaccaaaggactggccttcgtaaagcaaaactcttattacagccgattacacgttgattggaactccccatgtacggcaaagagatatctcgtttagattcgatatatgggccatcgactagcacgtttatatttcgaataattgttaccgttgccggaatagtttgatatttcaattcttctgccgcctgttgaatcaattcttcccatgtatatccggtccacatccaaatgtctttgcttcctttaaactcgtgtctgactcttattagaattttgcaaatcatctccctgttttccggcagcagtggatctccaccagtgagcgtaagccctcgaatataatcaggtctaagtaaatctacaattttatcaagcgtttcatctgtgaatggctgaccaccattcgggtcccatgtggtaggattctgacagccggggcaacgatgattgcatccagaaacaaaaatagtcacacgcacaccttcgccattggctatatcacaagggatgattttcatgtaattcattttcccacctcgattaaaagaccgcagaacgggcaacgattatagccaaggctttcgggcgactcttgtcctttaattccgccaccacaataatcacacacccatgccgagctctcacaattatctacgaactcaaatacagttgttggctggcgatctacttgaaaatcaataactcgttcaacatcttttaaagttttgatatgtccaagatttccttccagcaaaagacaatcctttaatctatcagcattaactagtttcatgtagttcatttaaaacatcaccgtccatagacttgcacaaacgataataaaaacattcagcacgacgcagccatacattccattctttttgtcacctttgaaaatatatgtagaagtatcatacaaaatctgttcagagcgaattgctgctgcggtgaaaatcaaaataatataagctttgatcataagcaaaacaatctcagtcagcatttatgtcacttcctttctgttaaaagcggaattttagaaaacacatccggttttgcattctttaaaatcttctacaccctcaattatttccttgtatctatctggaaagttttctggatagaaccagccaagttcttgatttactccatagtcgtaaaaaccaaattcctcccactttttaaggtagtaaacaaattgcttgtatggaataattttacgaaggcaagcatagacttggcgaggccacataacttttcggaatgtccaacacatagtaaagagaatcttctcacgctctttaagccccattcttctcttcctccgtcatatatcgccaatatactattgtatctgcaacttcattgtaatccgtatcataccatacgccattaaatgtgatgcacgcaacgctttctgtaccatccttgtactttacgattacgtcttccgaacacataccgtactccgggacaggaggagtaacatcttttgcgcaaaaccaccgcacatcaagtttctcttcttcgtatgacaccagctttatatcgtgataacaacgttgaagagcactctcgatctcactcttaattgggttgatgtcctcgtctccgttttcatcaaccagaagctcaagtgttactttcttcatcgttgtcctccgaaaagtactgccagtaatctggttctttgatggcagagaatacgccttcgctatgccatccccaagaactaaaaacagccgtatactctcgtccgtccttgtatttagttttgcatggaacaccatcagcttacgaatgatgagattcgggaactcgtgaagccaactttggatgaaatcaagggtgtcatgggcggtgactggcgtgatgcgttgctgtatttgcgtggcagtggaatgcgcgatgacccgaattacataaacagtctggaaaacgactacattaaagctcttatgattgagccggaaatgattaacgacccttatgtgcagaatcggattcgatactttattaaaaagcgaatctctcaggcaaaaacgggtgttgtgaaggtacgagggaattttcaagtagcgagcggagacccatatgcgctttgccaatccatgtttaagatggaagtcactggactgttaaaagctggcgaggtctacagccgattctggaacgaccgagatgttaagcgggtagcctgtttcagagcaccgatgagtcaaatggcaaatattcggtgtttgaatttaaattcgagtgacgaatgtaaaaactggtatcgttacatgaagacggtagctatcgtaagtgcgtttgataacacatgtgcagcactcgacggaatggactgggatggtgatctcatctttagcacagataacagagtccttcttgataaatggagagacgagactgtaattctttgtgctcagaaaaaaggtgaaaagaaagttccaaccgagcaggatttcattgactctaatatcaatggatttggtgatgatatcggtaaggtaagggtggcaacgtaccgaagtcctacctgcactatgaggttattaagcctgtttggaagaatattcaggtggaaacggacatttcgtttatggaaattcgtcgcaatggttggaagtctattgccactctgactacattcatgagcgagtctctgaagaacaagatgttctatgacgtcttcggtatggttgatgacatgattgctggtggtgagcagaagattgatgctcagggcaaggagcccactatgcaggatatggacgctctggctctgtacctgaatgagtacgcagatggtggtaatcccttcactgtcagcctgatgaagtattgtgctaagatgcgtcgtatgaccggctacgcagagtatctgtctgacgcagccaaggacgagtttaaccgttatggtctggtgaagacttacgacggcgtggctatcactggtatcagttctgccaagaaactgggcgatggttccctgctgatccccgataagcggatcttcggtattgctggaaagctgggcacccttgacatgaagggcgagactcatacttatgaggactatgacaacaataacgaaaaggttcatctgatgctgaaggacttctcttatggttacagcattgcacatcctgagcgtgttgctaagattgttctgcagtaatttttaccaaaggcaaatctgggcggagactttgcggtctccgcttttatagaaaaggagacaaattatgagttccgtgatggaaaagaagtttattgacgttctgaactgcgatgataacgtggttaccatttcgtcactgaacggtaagggttatactttcgagcccggtagtgtggaagagccttgtgtgattcctattccgccggaggagatgaagtcgttaatcggtgttgatgataagtttactgcttgcttaactgagcaaaatggaaagcttgaacttaatacggctaaattccgcacctttattaaggctcagcttgaggaagcaaatgccgccaatgatggtggcaagtctgccgatgagatgaagaagattctcaattggctgaattctagtgttgactcttctaccatctcctttgagcagttgactgatgccatcaagggctacggcactgcgatggacgaagctaaggaaaagacggacgctataaaatccgcattttctgggctgtatgatattcagcagaaaatcaagaatagtcaattcggtgttggcgaccttgatgcaacagaaagtaagatagagtctattttgcaactgagcaagttctttggtgacaacaaggatttgatggataatctcgttgacaaaaacggaaacatcaatcttaacaccgaggcgtttaagaaagcggctcttgatgaattggataagcgcataaaagccgcaaacgaaaccggtggtgcagcagctactgcgcttgcaaactcgttgagttctgataaggcaaatattgaaagcggcaaaatttctgttagtgattatcttgttggtcttggaactgacattgagcgtgtaaataccgagttggacaaatatcagactaattggagcacgctaaaagatgcgatggacgagtggaatactaccggccagctgacacaggataccatgcagaagctgctggaacttcctgaagaattttctaatctacttacttatgatgaagacggaaacgctaaaatcgacgtaaaggcgcttcgccaaagctacgttgataaactgagtgcgtttgcaaaagagtttgaaggcagtccgattggtattcaggttcaagccatgattgatgatgtgcgtgagccgactccagaagaatataaagcgcttgcagagaagactgcaacgtaccaaaaagctctagcgcaatacacaaagaaaatgtctgccattgattctaacaaggatctatcggaagacgaagcactccaacaaaaggccgaagttcaaaaagagcttgacgaggctatggaaaaggctcttctcgaagttcaagagaccgacgcacaggttacaacaaaactgaaaaagcactgggatggcgtcgaaaaggtaattgaggaattcaaatccgctctatccgatgcaaaagctgttctgtcctctttcctttgagtaaaaaagcgtgtttctactgctgaatcaaggatcacacaaactgaaaaggatatcacactgcgcgtagaaaaagacgattatactggcgaaaaacttgtttctatgataagtgcccagccagaatctgtaaaaatcagcgcaaaaaatattgagttaacaggagccgttacgattcaaaacggacaaactgtcttaaactctgaatcagtgaataatagcattacgcaaatagatggcagtaaaatcaatactggaacgatcgatgcaaacagattgaatttaagcggtggtttaacgattggttctggcggcagtattacaattggcaataatacaatatctgccgacaaattggcttcaggttctgtttttaaagaattgtggagaaacgatgcagaagtagaatatcaagtaggaacatttagttttgataattcgcagacgcaatataatgagcttttattcttttttagaggattgtttaagaatggaaaagtggaatacgacgagaaaggaacgataacccatgtcgaacaagttccaacaggaaacacagacagctatggagatccagaatatgaaactaagacgattattgactctacaataagaatagaaacttattatacttctacgaatactatggtcgttccattaatcgccaatacgacaatttggtatcatactttttttagttatccgtctgcatactttgtaagacaatgggaatattataaagcagacccgtcacaaaacattattcagggaacatataaagaaggtatgtcatttaatacagacgttgttgaaaacatggactggcaatggtgcaatagtaatattatgagatatttttcagtatctgtttctcaaaacaacactgtcacagttacatttaaaaacgcttttagatatactaccaaaaaaggtttttgggatgattcaggaaatgttaaaatataccccaattatgctatcccgcgtattatttacggaataaaataaattagtaaaggaggcgttaatttggcaaaacctataatttcaaaattttcagtaatagatgcagcgcaaaaaaacacggtgcgatatacctgttacgatgatacagtaaatgaagtcgaatatgtaatccatgataatgcctccggcaacatcattatcgataaaactgtaaatacaagtggggcatcttcgatacggacattcacgttaccagcgggtcttgtacataatagattacttgtgttctacggcagtgaagcgaactattacaacggaaacttctctggcgttattatcaaatgggatcagtcaacggatatgtttgattttgatggttctgtggattatcgtgaaacatttattgactggctgacgaataaaaagccaaaggttttaaagatgtacgacggtcgcgcatggctgataaacgcaaacggaaatgtttcttattctgacgatgagcacccagacaaggtggaaatttcgtttgattttatagagactggcgatttaaatagcagcagcgatatgaagaacgctggtttaatttaaggaggtgggccatgacttacttaccaacagaagaagatctggccttactgaaaagccggtcaaaaagattgtactgtcgtattgagttgttgaataaaaactaccagattatcgacatgatagaaggacttgcattaagcggctcaaactctattgatgcagattcagatacgcggcgtacatttaatcttgatatttttcctaaaaaaggtttttctatttctcaattctctaccgaagaatggacaagtaaaatgctgcgtctgcgtattggcatgaaagcgccaacaagcgaatcgttgattgatttaaacgatattactccttcagaagataaaatagagagtgttataaaaaccgatatattatacataagtaaagccatagagttacgacaagcaatatggagatatcaaattggtggttacgcacagtatggaaatattgataacataaaccgtcaacgcatcatgtggacagaacagaataaaaagacgtatgcagaatttctaaacgaaattggcgaaagcggcacgtactccacagttcttggcactttcgatggatacgagtttaataaaaagaagtatcaaatcgcgtacacgccaatgcttgtcaatacggataatacgattattccgttattgaaaacagatataaattcatatcttgaatcaatctttaatgcagcatgtgattctattcaaaaagatagcacaacactgcagagtaaaatattggaattggacgccatcggtattgactgcacaatatacggaaacaagattcgtgtgaaaaatatgattacttcgtcaaagattctaccctgttccactatctgtttaccgagcgccataccatggttgataaccgtgcgaagaacgtattcccacacacgactgaccttgtacactgggatttctgctttgactacgataatgataccgccatgggcaacgataacgagggtggtctgacgctgagttatggctacgaagatatggacaccatcggcacaaaaagtgtgttcaacgcacatgattctaagctgtggtgcaagattcgtgacctgtttgcagacgacctcgcaaagatgttcctgaaccgtgaaagtgctctggcatggagcgcaaatcgtatcctgaagaagttcgaagattatcaggacgtaaagcctgaaaagctgtggatcatggatatgcggcgcaagtatttccgtacttatgaggacaatggcacaactagctatctgcctatgatgcacggcaataagcgtcatcagcggcgtcagttccagcgttatcaagaaaaatacatggcatctaagtatacgggtgccacttgtacctctgacgatatgaccattcgtggttatactccgaccaactggacaggtgtgaaaccagatggtacattccatattgttccgtatgctgatacttatgtctctgtgcggtatggttctaaccctgtgaaggtgcgtggtaagcgtggtcaaacttatgagattcagtgtccgattgcggctatgaatgataccgaggtttatgtttataatgcttctattatccagagtattggtgacatttctggtttctaccccggctatgttgatttcagccacggcgtaaagctgactgacctgaagattggttctgccgccgagggttacaagaatacaaacatgactgattttgcggttggcaacaacacactgcttgagcatttgaacctacagaacgtgccaaacctgaagaagtccatcagtctgaccggttgtacgaatctggaagagttctatgctggcggttctggtattactggtgttgcgtttgctaagggtggcaaaatcaagaaagctgaactgcctgcaattgcaagcttaagtgctaagaacttgaactatctgactgagctgaagattacagactataagaatatcaccacactgacagttgagaactgcccaaccatcgacctgactgatatgctggctaagtgcacgaacttgaatcgtgtgcgtctgactggcgttgattggcagctggataacacttccctgctggatcgtctattgaagatgaccggtttggatgagaatggctataacactgaccattctgttgttgaaggtagtgtccatgtgcccattatgcgtgagcgtcagctggcagagtttacggcacagtggcctgatttgaatatcacttacaatacactggttcagcagttcaagtggacgttcgtgaataaagacggcactgttctggatatccagtacattgataagggtggtaaggcagttgaccctgttacccgtaaagagaatccgattccgacgcccactactgagagcacaatctctacggactttactttcagtggctgggatacagagtttacgacagttttcagcaatcagactgttactgctctgtatactgaatctgtacgtaaatacactgtccgctatatgaatcgtggggctgtactgcaagagactgttgctccgtatggttctatggtgctttatactggcgacactccgacttatacttctgaggaaactgcttttaagtattacttgttcagtagttgggataagggcggctatgttattggcgataaagatatcaacgcagtttatgatgtatgcgaatattcttccacttactttgatggcaaggaaattggtcaacttcgtcctgttgaaatctatgccatgagcaaggtcggtgtagagcagaaaatagtagaagcaaaagacgaagtttctattaaacttggtaatgactttagttacgatgatattaccgagaagattctcataagcgagccgcaggtatttgatggcaagaattacattgataccgacatcaagctgtttgaggaggacagagattttgttctggctgttgactataagatggacgccacgaacgcaaacaacactgttttgatgcagtgttttgaacagaatggcatgaacggcatccgcttgtggaattctacaggcgtgaagacaacatggggtatcgactctgcaaatggtgtatctgctggctctcgtgatatgaccgtcatccgccatgttaaaggggataatgggctgtacgtctactcttctaatatttatggctctgcattgagttatacaaagattactcgcacccgtatcacaaagacgaatgccacattggtgtttggctgtgcaaaggcagatgatggtgcttacgagcgccacgctaaaggtacggtttattggtctaagctttggtatgcagatcttggtgacgctgcttgtcgtgaattggctgcatggacacacgataatctgattgtagaggttgcaagctttaagaattactacttgagcgacaattccaataaacgctgcgctatgacattcttgcagagagatactttgagtcaagagatgatgcttagctctgctgctaataatgccggtggctggggtaatacctccttgcgcgaatacttaaattcccgtctagttgacgctttgccgattggctggaaacagttaattaagaaagttaaagtgccgagttctgccggtaataagagtaaggaaattgtaacttcggattgttatttctttattccttctgcgatcgaagtaagttctttgatgactgatgagccatatgtttacgaaggtcagactatcagctacatgaccggcaatgaatccagaatcaagcacaatgcagagggtagggcaacaaagtattggttgcgcagcccgtttgcaacctatgatggatacttctatgcaattgaggagactggtgagctgtatggcttccattatccctctgagcagttaggggtaaccgtgatgttcagcatttaaggaggtgttgagagtgtattataaggtacttaaaaacggtcgggcgatcgatgctcttgaccgccttcagtttgtgaaataccagccgaaacatggtattatggtgaactgtatcgaggatgacgcacagggcattatcagcagcaatggcaagtatatctggcatgtagatggctactattacatccctgttgatggttatgatactgtggagttacaggagatcgacaaatacgaatatgaccaaatcaaagccttgggtgggacttcgcctgaggctattattgatgcttatactctgacactgattgaaggagggctgctatgagcgaggaaaagaaatataacgagttcgttgaaagtttgcatcgactctatcatgaccataaggtacagaattcattcttgaagaagaagcttgatgaagggcggatctctctggatgagtatgagtatgtcgtgaatggaaaggaggtgtaagccgtgtatacttttttgatcaatgagaataacactcttactgcgagtttggttgagcgtatcatggaacggagtaaactggtaaataacctgcattttctggctggtcagacttggcagggtctaaacatggcggattataccgttctgttggagtatgttctgcctgtcagtaagcgttataaaactgaaattctaacaaaatcaaaagaactgtacaagaatagattggaatacattctgccttttgatacgaatctgaccagtgaacctggtgatattcagatgtggctgacatttgctacggtggacatgacagagaaaggccagacgatccagcgtgtgcgcaaagttggccccggcgtagtacatatcatccccgtcgataactgggctgaaatgattccggacgaggccctgtcctctctagatcagcgcattctggagcttatcgctctgaacaagagtatgtatgaccagctgaatacgaatctggatggtaaagccgataacattaaatatcagaacaacatcctgcagcttacctcgaatggcaaggagatcggaaatgctgtcgaaatcacaggcggcggttctggtacagattctcatacgatgcgggtggttccgttctaagccatccgctctcttaataaggaggcaacgatggcaaaagaatattcaaaactcggctacggcaatgacgaagatattgatgctgccattgctcttggcctgattgacgaacgcgacatgatcattacaaaagacacttctgagctgaagtatgtgcgtgatgatttatccgttcaaacaattcgcccgcgaaatttgatgtttaacacggtctcggaagcaaacaaggcgctgaatgctgcagatgattcatatgctgggcagaccgtgatgataaaagacaataaaggtaagtatgctccgtgggtcgtacagcaaagtgcgtccacggggcgctttttagttgagccgtttattgtgagccagacaaatttccagtggacggaattctaaaaagaaggaggaacaaatggcacaagtaaaattttcatatggcacgaaagcacggtatgatgccctatcccccaaggatatggatacgctgtactttacgaccgatacattacagttattcaaaggcactgctgaatatacgaaaaccagtaagatggtttctgctctgccgacgactggtcagattcagggtatcatctatttccgcatgacagattatagtatgcacatctggaacggcgtggaatttgtacagctgaataaatcgacagtaacagagatcccggcagatgcaaccgacaatgatattccgaccaccaaggctgtcgccgattatgtcaatgccaaggttgccgcagtggaaggtatcaagggtaaattcgttacagatgttacctataatgctggtgtgttgagtgtggcaaagggtgacgaacctgttactactaccctgactggtgttgttcatgagccaacctatgacgcagagactcgcacaatcaaactgcccgtctttggtggtgacacactgacgattgctctgggcaaggacttggttgtaaagagtggtatctataacaccgagactcatgagatcgagctgactattaccaccggagaggttattaagattcctgttggctccctgattgatatttatatcggcgtggcaacttctactgcaactgtgactgtttctgatgacaataaaatcagtgttgatgtgcgtgtgtccgcaaaagccaataactctattacaattgaagaggatggtctgtatgtggctgtgcctgatgcttataccaagtctgagactgacgcaaagatcaagaaggtgcaagaccagctagacggtcattccaaggatgctgtggtgcacattaccgctgaagagcgcaaggcttggaatgcaaaggtgtctcaggatgaactgactgctgcgaaatcagaagtaatttctgccgctgctgctgatgctactaaaaaggcggatgccgctcgcgatactgcaaaaacctatgcagacggtttgaatactgctatggataatcgcgttaagaatgtcgagggggctctgacttggaaggctattgatgattccggcgcgaacgctgagacataataatctaacataaatccctgcactctgtaatggagtgtggggtatttttatcgaaaaggagtttctacgatgtcaaaattatctctgcgcgaaattgcgcaatctcagctcgattcgactcctgtaattgatggacagcttattgtttgccttgacacgggaaacgcctatcgagacactgctacggctcacgtaaaaatcggaagcgatttagaggttgtgagcgacttaccattggctcctctagccgaaaaactttattacttgaagcctgataaactgtatgtgttcttgggtggcaattggatattgttgaacgataaaaccatcgatttagataaagctatctcgaagctgcctgccggaagttcgactgctttgaatgacgatgtggagatcattacacaggatacagacactacgcaggcgcattattaccggcgcaagctagtcgtgctatgggagtatatcaaaacaaaggcacaggatttctttgcggcgaaaaaccacaaacacggaaaagcagatatcactgactttcctacctcgatgcccgcaagtgatgtgtatccgtgggcaaaggcagcaacaaagccgagttacactaaggctgagattggattgggaaaagtagataatactgcggacgctgacaagactgttaagcgggcaactactgccggaacagcagacagtgcaaatagtgttgcgtggggaaatgtgaaaaataagccgacggcattccctgttgaaacgcacagccacgatgatagatactatgggttgacaaaagtataacatttcttattagccaggactttagcggcggaggttatggtatctgtcgtttggtatatcgtagtaacgcagattctggaaatgcaagcgtcgatgctcagtggcttgtacgcagaggattttcagcggatacaattcaagtggcaataaaaacagacaaaacaaatggtgcttattgtgatgcgttttataaatcgagcggtacttatatgggtgtagttatacgagctatcgcatcaggcggcagagccacttctggtcgtacttggacccttgtagattctaatgaggttggtggtactacagcaacagataaaaagacgtcatccgaatgctggaaaacaattgctgatgctggaacggctctccataaacaagcctattctgcctcagctcctgcaaaagatgaaggttatgttgctagcgccggttcagccaacacatcttcttcttgtactggcaattcagcgtccgcgacaaaactcacatcttctgctggttctgcaacacagcctgtttatttcaaggacggtaagcctgttgctggaacatatactcttggagatgcatcaagcaaaacggttcgtacattgggcgctgttggaaataccggctggacaaataaaacaacggatgataagtatatccctacgatgtcttttatggcctactggaatggcgcatacagcggaacatcttcaaacctgcaatactgtgatcgtggtagatttggcacgatcgtgactaagggtagtggtgattatgcagctgccgggcacacgcacaattatgctggttctagtagcgctggtggctctgcgaactcagcagtcaaactggattccaacgctggttctagtgttcagccagtctacttctctggcggcaaacctgttgcaatcggatacactatctcatcttctgttccggctaatgctaaattcacagataccacttatggtgtagccagttcgtcttcaaacggtcttatgtcttctactgataaaacaaagttggatgatttcagccgtgttatcagcattcaaaagcaaatcaagttgactacagattggctagatactggcattgctggaaacaatcttgatactggaacttatgttgttcaggtgagtggatttaattcaagctacacacagctttacagtgaaatctattctggtgttatgagttggtatagtggtactacgaacagtggcaattcgtctgagattttcctgcataacgccggactcgcagataataacaatgcaatctatcttagaactttgcgcgttgctggaagtaaaacactgaaactacaaatcgcctgcaaggttgctgctactggcactgacacactaacatttaaattcagacggttgatataaaaggagatgataagatgcgaagaatgaaagataaaattgaagcaaccgtaacaaacgcagactatgccacctccgccggttcagcgtcaaaagcaaccaacgccacaaatgcaacaaaggccacaactgcagataaacttggtacaagcgctggcacaactacgcaacctgtttattttaaagatggtaagcctgttgtaattggatatacgattgccaagagtgttcctgccgatgcgaagtttaccgatacaaatacatggcgcgggattcaaaataatttgacaagtgatagcaaagatcaaagtcttagtgctgcgcagggaaaagcgttgaaaacattggtcgatggtaaggcggcagttggacatacgcacaatagcgtaaaagacgcaggagacaactcttcaaataccacatttgcctattcaaaatcaggtatgaactatggagattatagttggcttgctggttggaatggatatgagttacgagctataaataaaaaccaatttgctactgctggacataatcacgatagccgctattatactgaaagcgaaattgattccaagctcgatggtaaaagtaacgttggacatacccacgactatcttcctactgctggtggaacgatgaatggcactattacgttctctgattcttctcatggaaaaatttattctggtcctacggataatgttaatggtcccggtggagatttaaataatattgttattgaatcatggaatggtctctcttttacaacgggttgtccaaatcaaacatacactggaaaaactgctgttggtattgactgccgcgaaggcgttgttaaagcagcacgatttgatggtacactgactggcactgctgcaacactcggtggcggtggtaatccttatgctcctatgactttcaattggtctggtaaagatggtcagccaacatggttatggggtggagaagatggaactaatatgtatgtatacaatccgggtaatttcagtgtaaactgggcacagggcgcggcaaatggtgtgtatgcaaacggatttaagagtagtcgtggtggatatatacgtttctgcaacggactacaaatatgctggggagaaaacaacaaaaataccacagctgcagtttttgacgttccgtttaaaaccgtcgattatacgcttgtacttggaggaactgatgatttaaataatgcgtggtatattgcttctcgtacaactacaggtttcacaccaaaacagaatggcttcgctggggtcaccaactggattgctattggaagatggaactgattatatttttaagcttataagcaatgttatttgtttaaacagatctatgtattgttttattagaaagaagaggtgaaaaatttggacgaagaaatcaaagttgggtattttattatgaaaccagtcaagacacaagagcaatgcgaccagtattctgcaatggcgacacaactcaatgctcataatagcgttgccgcaccaggtgacgctctctggactattgatgataaagaagaccgctatgaaattattgagtcaggcacagttccaaccgtagaagaagctcttgaaccacaaaaggaatacaaaatatccgagtcaaaaactactctctctgaataccttgcatctcacccactccaatggacagacggaaagtattatagcgttaccagtgaaaagcaggctttgctcacatcaaacctatctctgtatcagctcgccgtctctaatggacaaacattccagctgaaatggaacacaaccggaaatgaatgcaccgaatgggaatatgaagatctcgcagcactggctatggcaattggtacttatgtgcaaccatttgtagcgcgtcagcaggaattggaaattgctatcaaggcttgtactacaatggaagagcttgatgcaatcgaaatcaactacgaccctgttctgaagcaatatcttgagaccgccgggttgaaggaggttgtagaatgagtaaaatcgtaaagaagtataaagaattatttaaatgtgcgcttctctttttgataggaggggcgctttattattgcatcgagattttatggcgtggtcactcgcactggactatggctgtagtgggcggcatctgttttgtggtcatcggcggattgaacaattatattccgtgggaaatgcccatgtggaagcagggtcttgtcggtgcgttgtttgtgactggtatggaacttgttgttggtatcccgctgaatctaatgcttggtttgcatatctgggactactcttccctgccattcaatctgcttggtcaaatctgtctgccatttactgtgttatggttcttccttgcgctgttgtgcatttatgcggatgactggatgcgctatatcatgtttcacgaggacaagccgcactatcactggcgtaaggtatgtaagccgaagcagtaaataaactaaaagtatatgtaaaaacagaaagagccccgggctgttacacccagagctctcccgccacacacctatacaaagataggacgtcataaattcgctcgacgaatcttgacggaactattctatcatagtgtgaaatttttgtcaaccagaatcgaggtgatgaaatgattggtttgttgactgccgcaccacacacagctcctggcgttatcagctttacgattgaacagctttggcaaatggttctgagtatcgctggcggtattacagctatttcagctgcccttgttgtcattataaaagcaatcaagaaagcgaaagaacccgacacaaagcagaatatgaagctcactgagcacgacaagcatctggaagatatcgaccgcaaactcaagaatgataaagaggttttggatttatatcgctccaaacttttgtcacttgaagagcatcaaaaggaacaggatattgttgttgaagaccatggccgaaaaatcgctggcgtggaacagcgtgtgaataagagcgaacatggtatcaatgttatgatgaaagccctgctggctctgcttagtcacggtattgatggtaatgctattgaccccatgaaggaagctaaggctgcgcttgaaagctacttgatcgacgggcaaaatttaaaagacatttaatacatagctcggtacgtgtgtgccgggctttatttttttattcaaacaggaggtactactatggcaagtattattaatgagatcgtctctgttattgtgaagctggttatcactgttgctggcaccgcatttatgacctatggcattccctacctgaagcagatcggtatgtataagattgttcagatggctgtgcgtgccgctgagaagttaggcgttactggcgcaattcagaaggctgacaagaagaagtatgttattgccgcgctggagaagatgaatatcaagatcactcctactatcgagatgatgattgaggccgcagtcaaggagatggatatccagaataacaaaatcaatgcggaattcaagaaggattgaaggtgtggctctatgagcattattacatattctatgaagaaggactggaacaagaagctgtccaagaatttctgtgcctatgaatttgcttgcaatgaccggagtgatgagttcaaggtggcaactgagctggtggagactctgcagcagattcgtgaccacttcggcaagccggttctgattagttctgcctaccgtactcctgcatataacatttcaatcggtggcagttctcgtagtcagcattgtcttggcacagcagcggatatccacatcgctggtatcgatccaattcgtattgcactgtatgtagcctccctcccctacttccagaagcatggcggcattggatattatagtcgtgcacaggtgacgggtggctttgttcatattgatgtgcgtgagtctcctagccgttgggtcagtaaaagtggtactgcatatcaggtcgtgagtaaaatcatgcccacgattcgtcagggctctaaggactgcactggtggcgtgtcttatgctgtgaccgtattacagcggcatttaggcttgaaggtagatggcatctttggcgctggtacaaaagccaaactggtagaatggcagaaagcacatggattggcggctgacggcatctgcggaatggcaacatggagttcgttttgatttgattgttgacatctaaatgtgtataggatatagtgtatctatcatgtgtggaggtgcgctatgtctattgttgtacgtggatgtcatatcggtgaaggcagaccaaaagtcatagttcctatcgtggaaacaatcgaatcaaggattttagaacgtgcatttgagttttcaaggtttcgcattgactgtgtagagtggcgtgttgatcggtttgagcaatgcatggatgcacattctgtggtgtcttgtttgcaaaaacttcgtgtagcattaagggacaagcttctgctggtgaccttccgcaccaaggcagagggcggaaaagtgtctttgacccacaaagaatatttagatttcatcaacacggtaatagatactgactgtgccgaccttattgacattgagttctttacagccggagatgatattcgtgagctgatagacaatgcacattcttctggagttgtggttgtatgttcaagtcacgatttccaaaagactcctgataaaaatgagttagtgtcgcgcatggtgaagatgcaacaagttggagctgatttgccaaaagtagcagttatgccacacgacagcacagatgtgttgactttactgtccgctacgattgaaatgaaaaacaaatattttgttactcctgttatcacaatcagcatgggtaagcttggtgttgccagtagattgtgtggagaggtgtttggctccgcaatgaccttcgcaagtgccggagattcaagtgctcccggacagataagctttgatgtcatgaatctagttcttgattcaataatggaataaaaatggggtattggtccaattaaggatcaataccctattttttagcgtttgctatttagttcgataccaaggattgctaaatgccatacagatgctttgatgtccgccttgtttcaaatgcgattttcaattttaatatggtttgccggattgtcacatcgggctcttttaagactcaaaatcggatttgacaattagctagaattggtgtagtagtggtgtagtaaatagagcgagccgttattattattcgatacatcatttatttttggaagattttaagcgagatggtaatttttttgtaatttattttgttaactttttatgtcctgcaccgccgggctgccgcaaacattatttccctttttgtgcccggtatggtatactggctttgaatatgctgccacaggcagaaaaaggagtttaggatacggatatgaaaacaaaattgggtattgtgggctgcggctttctgggcaacatcgtggctgacgcgtggaagaagggtctgctgccggactacgagctggtgggcgtgaccagccgcacccgcgcctcggctgaaaagaccgccgccaatgtcggctgcgctgtttgtgaggacgtggacgcgctgctggcgcttgagccggagtacatcgtggaggccgcttcggtggagtcggtgcgcgctatggccatcccggtgctgaagcggggcgtgaatctggtcattctgtccatcggtgcctttgcggatctggatttctacgcacaggtcaaggcagctgccgtggagggcggtgccaaggtgcacctgaccagcggtgccatcggcggctttgatgtgctgcagaccgtcaccctgatggcacaggcgcagggcttgccggagactgccggcatcgagacccacaccggtgcaaaaggcttccgcaacacgccggtgtgggcagagcacctgctgaccgacaccgaaaagaccaccgtgttcaccggcaacgcaaaacaggccattgctaccttcccccgccgggtgaacgtggcggtggctacttctctggctactaccggccccgagatcaccggggtgaccatgcactccgtgcccggctgggtgggcgatgaccactgcatcactgccgagatcgagggcgtaaaggctgtggtggatatctgctcctccaccagcgccattgcaggctggagcgccgtctccctgctgcgcaatctggcttcacccgtctgcttctactaatataaggaggagtccgtcatgtttgaaaagcttgttgccattgagccggtcagcctgatcccctctgccgaggaggagctgcaccgctacgccaagcaggtggtgctgtaccgggacgtacccgccagcgatgacgagatggtgcgccgcattggagacgccgatgccgtactgctgagctacacctcccgcatgggcaaggaagtcatcgcgcagtgccccaacatccgctatatcgggatgtgctgcagcctgtactctgaggagagtgccaacgtggatatcgcctacgcacgcacccggggcatccaggtgctgggcatccgggactacggcgaccgcggcgttgtggagtacgttctgcacgagctgaccggcctgctgcacggctttgggatgcccatgctgcgggacgagccggtagagatcaccggcctgaaggtgggcatcgtgggtctgggcgtttccggccggatgatcgccgatgcgctgcaatttatgggcgcagagatcagctactttgcccgcagcgcaaagccggacgccgaggccgccggtatgaccttcaagcccctgccccagctgctggcggacagcgaggtggtgttcacctgcctgaacaagaatgtgctgctgctgggcgaaaacgagtttgcccagctgggtgcagacaaggtgctgttcaacacctccatcggccccggctttgactccgctgcgctggaaaagtggctcgatctgcccggcacccgcttcttctgcgacacccgcgccgctgcaggccccgtggccgaggacttctttgcccgggaaaacgtgcgctgcgccaatgtgtccgccggccgcaccaagcaggcctttgtgctgctgagcaaaaaggtgctggacaacctccgcaccgcactgggcgaataaaaaacaaggagtgtttatctatgaaaactgcattgaccattgccggcagtgattccagcggcggcgccgggatccaggccgatatcaagaccatgaccgccaacggcgtgtttgccatgagcgccattaccgccctgacagcacagaacaccaccggtgtgaccgccatttttgacaccacgccgcagtttctagcgcagcagctcgatgccgtgttcaccgacatctacccggatgcggtgaagatcggcatggtatcctctgccccgctcatcgacaccatcgccgagcggctgcacttctacggcgcaaagcatatcgtggtggaccctgtgatggtggctacctccggcgcaaagctgctgcaggacgatgccgtgcaggcgctgaccgaaaagctgctgccgctggctgaggtgcttactcccaacatcccggaagcggagatcctgtccggcatgaccattacaaacgccgccgacatggaagctgctgcccgcaccatcagccagcgttacggctgcgccgtgctgtgcaagggcggccaccagatcaacgatgccgacgaccttttgtggcgcaacggcaccggcaagtggttcaagggcaagcgcatcgcaaaccccaacacccacggcaccggctgcaccctgtccagcgccatcgcttccaatctggccaaggggtacgaccttgacaccgccgtggagcgcgccaaggcctacatttccggctgtctgtctgccatgctggatttagggcacggctccgggcccatggatcacaccttcaacctgaagggagattttgtccgtgactgacctgccctttgtttcggcgctggtgcaggccgacctgcccgtgtgggaacagtgcttacagaccgagtttctgcaaaagatggaaaacggcaccctgagcgaggactgctttaaaagctaccttgtggaggacagcctatatctgcgggagtacgccaaaatttttgcgtggggcatgaccaaggccaccaccatggcggctatgcgcacttactattccctgctgtccttcgtgcaggagaacgaggatctgacccggctgcggtatctggagcagtacggcctgcgggaagccgatatccagtccctgcccctgcggccggagaaccgcgcttatctggactgcatgatcgacgccgcccgcaacggcgagggggaagccgagtgcctgatggcctgcctgccctgtatgctgagctatggctggctattccagaagcttttgcagcgctcccccgccgtaaaggatacctactacggcgcgctggtgctggactatgccagccccggctacgacgccgcctgccgcacatgggctgaacgcgccgaagccgcctgcaccggcctttcgccggagcgcgccgcccgctgccgcgcgatcttccgcgcctgctcggagcacgagctgcacttctgggagatgtgcgccgcaccccggacggatatttagtctttgatatgcaaacgacccactgcaagttttatgcagtgggtcgtttattttcagcctacttaccccttccgtctgctcccgttggtcgcagccaccttccccaaggggacggcttttgcagcaacgggcagctttccggcacagccataaggcgtccccttagggaagctgtcggcgcaggcggctgaaggggtaaatacaaatcatttttatcgcagcaccgagagttcctcaatgccgtagcgctgcatcagggcgatggccgccggggtgatctcctcgccgctgaccgccacagggatggcgggcgggcaggacaccgtaggcatggcgcatacccgtcccagtgccttgtgcaccgggatgcgcacctgtgcgcccagcaccgcttgccggatggtacaccgctgcaccgcctgctgctgcaaggcggcaaactcccctgcccggttctccgggcgggacagtccggcgggcaccgcagccagaagctgttccagcgcggtttgcaagcgttcaaagtcctgcggcgggttctccggggtgaacatcagcaccacatagcgggggtcggcgtactcgcattccatctgtgcgcggcgcaaggattccgccagcgctgtgccggtgcagccaagggcggcggcatccagcgtaagcttcatcggctcctgctgcgcaccggcaactgccagcggcaccgggcactgccgcgccgctgcggccttgttcaggctgtggcgcagaccttccagcgccgcgcagcactgcgccagccgccgggggtaatcccctgccagcaccgcgttgcaggcatccagcgactgcaaaatgaggtaagaggggctggtagagccgaacagcgccagcgcaccccgcacggcggcttcgtcctgcacgggggcatcgtgcgccagatgcagatacgcgccgccggtgaccaccggcagggtcttgtgggcagagtcgcagcacatggccgcgccctgcgcgatggggtggcagttctgcggcagaaagcgcaggtaggccccgtgggcgttatccaccagcaacggcacaccctgcgcccggcagaccgccgccagcgccgggatatcctgcaccccgcccagataatccgggctggtgacgtacacgccaaagggctctatcccctgctgcgccagcgcgtgcaaagccccggtcagcgcttcggctgtgacggggcagctgcacagtgcaccctctgcctgcgcagacggccaaagccagcagatatcaaaatccagcagcgccgccgcatacagcagcgccttgtgggcgttgcgggcggccagcagcaccgggcgcttaccgttttgcggtgcgccttgcagcgccagaaacagcatggcgcggatgcactgagatgagccctcggtgctgtaatagctgtgtgccgtgccgaacagccgggtggcgttggcttcactctcggcaataatgccctccggcgcgtaaagctcgtctgcgccgcagatctcggtgatatccagcggctcaaagcctaaaaggctctgccccttgtggccgggcatatgcagccgggcagtgccggactgtgcatagctgcgcacaaaatccacgatgggggtggtcatgctcattcgcaggcttcgccatcggcgcaggcgttgcaggtggagcccagctcaatgggcacctcgatgcccttggcagccagctcctgattctcggccaccttgatcatgatggcgcactccatgcgctttttgaacagctcgcagccgtactcgtacacgccggtaatgctgccggtggcatggtaggagttggcagcgcagccgccggagcagtacagctttgcccagcagtcctgacactccttgcgggcgtaggcgttgcagtgcttgaactcatcccgcacggcggtgttggtaacgcccttccagatatcgcccagcaggtacttggggtcgcccacgaactggtggcaggggtacaagtcgccccaaggggtaaccgccatgtactcggtgccggagccgcagccggagatacgcttatagatgcagggaccgccggtcagatcgatcatgtagtggtagaaggtaaaacctctgccctcgcggtcgcgcttgatcatctccttggcaaggatctcgtactgctccttcaggatgggcagatccgcctcggtcagggcgctggggtcgctggggtcgcagaccaccggctccatgctcagctcggtaaagccaaggtctgccatgtggaagatatcgttggtgaagtcggtgttaaagtgggtataggtgccgcgcatatagtagttcttgtcgccgcgctttttcacgaactcctgaaacttgggcacgatgcggtcgtagctgccgttgcctgcgcagtccacgcggaaacggtcattgacctccttgcggccgtccagactcagcaccacgttgtggcactccttgttgcagaaatcgataacgtcatcatcgatcagcacgccgttggtggtcatggtaaagcggaagttcttgttgtggatcttctcctgctcgcggcagtaggccaccagctttttgaccatatcaaagttcatcagcggctcgccgccaaagaagtccacttccagattgcggcgggtgccgctgttctcgatgaggaagtccatggcgcgcttgcccacctcaaagctcatcagtgcgcggtcgccgtggtaacggccctgcgaagcaaagcagtaagagcagctcaggttgcagctgtgggcaacgtgcaggcacagcgcctttaccacggtgttgcggttcttgaagtcaaaggccatgtccttatagacatccgggctccacagcttgccgttttccttcaggctggtcacatcgtcgatgcactggcgcagatcctcctcggtcacgtccgggcggctgccgtactttgccagcatggcggcaacgatctcgtctgcggtatgctccgggtacatggcgatgacatcgtaggccacctcgtccacaacgtgcaccgagccgctgcaggtgtccagcacgatgttataaccgtttaattgatactgatgtaccattttacactccattccagattacacaaaaaaatgccgcccggcaaaggcggcataaggtttgcaaaaattacttgttgctgttctcgcactgctggttagccacgccgcaggaagtcttgcaggcggactggcaggaagtctggcactcgccgcagccaccggtcttaacgctcttggtcaggtcacgagtagcaatagtcttgatacgctccatgatagaaacctctctaactctcaaaaatttatcgcgccggacatagttccggtacgcttttatcttttaataggatatcacgcagcgcggcttttgtcaagattttttcgctaagccctttcacccgcccatgggctggtagcgggtaagcaccgtatgcagtcccagctcccgggcgcgtgccagtaagtaccggtaacggcacagcagcgcctgccgctcgtagatgcgctgctcgatcaggtccgtatccacctccatgtcaaacatcatctcgttgcgcttcaggcagaacaggcattctttcagttcttcttccagttccgggtggtagcgctcgtgctcggtatcccgcgggacgcggggcgaaagcagggtctgggcgttttgtgtggttcgttccggcataggcatcctccttctggtactttgcaaggttttgtaccttccagtataggcggtgcggtgcgcagaatgtgccgaagcgtggcaacgctccggcacagattatccggcgctgctgcggcattttccaaaaaagtacaacttttttcaaaattatgcttgacaactccgggcttttcccgtataatagcacacgttgagcggctcaccccgcaaaacacaacagaatattggggatttgcatagtggtagtgcggtagactctgactctacttgtgggagttcgattctctcatccccaaccagaacaaagccatctgaggaaactcgggtggcttttctgtttgcattattctgagccacagccgcaaggccgtgactcttcaaaacccctgtggatcatagggaacttttgaagagtcacccctgccagggaaactcccccagtctgctgcgcagacagccccctcggggatggggcctttggcatggtgggaaagttcccggtttcgccagaggctccctcccagagggagctggcaaagccgtcaggctttgactgagggagtttccccgcacacacaaaaaccgggcagcccgcagactgcccggttttttgctataccgttgattttgccttaataaagagctttcttttacagaatagtaatgcggcctgcgccgtagggctgctcgtagttgagcaggtagccggggtaagcggccagcgggctgttggcgctggacaggtgcggcagacccgcagcatccgcgccgtcaaagatcatagcgtaggtagacatcaccagataatcctcggacacatagtccttgatcagctctgcgccgtcaaacatggcaaagccgtcgcccagattgcgcagggtgtagttcatgccggccagcgcgtaggtagcgcccgggtccagcggcagatagctgccggaagccttatcgtagatcttcacgttctgcacgcgcggagtgccggtggcgctgccgatccagacattcttctcgtcggtctgcacggtgttggggatatcggtgtggatctcgtaggtagcacctgccacctgcaggaagccgccgttctccttgccgccctcgcctgcaaagcgggctgcaaactccaatgcgtcctggatctgcttgccggtgaccgacatcaggcaggccacgttgccaaaggggctgacctgcttgcaggtcttgaaggtccaatcgcctgcgggcacatcggcgcggatgccgccgccattcatgatggccagatcacagtgcagcttttccacttcgttgaagtaggcgtagatgccgtcggccacaaagtcgccgaggttggtctcggcagagcggatgcggcgcttgccggtggcagggtcggaaacatagaaatcgctgtcgcccacagcgatcttctcgcccagcatatcgtccacggtgttcacccagctggtctgcatggcggcaatacctgcatccatgccctcgtgggtggggatgagcttggtggtgatggtgccgtccgcagcgatggtcatctcgccaacgttggcaaagtaagaaccggtctgggtcagggtgaccgccttgccggaggcatcctgcacctgcttgttctccattacggtatgggagtggccgtcgataaaggcgtcaaagccgctggtgtgggcaatgacttcctcactggtccacggagaggaagaggggtctacgcccagatggcccagaccgatgaccacgtctgccagaagctttgccttatcaatggccttctgcacggcgtcatagagctttttgccgtcctcgccgccctgaatatcgtagatgtacttgcgctgtgccttatccataaagtaggccggggtggacttggtaaaggtctcgggggtggtcacgcccacaaaggcaatgcgtctgccgccgcgcacgaacaccttgacggagggcagcacacgcaggccggtgcgcaggtctacccagttgcaggacaggtacgggaagtccgcttccttcatgatggccttggcgcggtccatgccgtagtcaaactcgtggttgccgggggtagcgacatcgtaaccggcagcgttcatcagcttgatgatggaagcgccctcgtccatagagccataggcagtgccctgcacatggtcgcctgcgtccaccagcagcacatccttgccggcgttctggtagctctgcttcaggtcggcaatggcggcgtaggtcagcttggggctctgcttgtcgatgtaagtatggacatcgttggtgtacaggatggtgacgtcagacttatcaccaagccagcaggccgatgcggcgggtgcaccgatggccatggatgcagcggcagcggtcacaccagcagcctttaaaaagctgcgacgggaaataagttgtttcacaggaaaacgacctccttttatttttggcgtatcgcatttggggcaggctcttccctcctgccctttcaatagctctagcatagcacagaacgccgccgcagacaagccaaaatcgttcttttggcacaaataattttcacgtcccgctttattttgacacaaattgtaccatttttacacaaatcctatacaaaaaagacctccccgcaccctgtcgcagagcagcggagaggtccttttcaggggggattcagacccgtttccgggtctatcggaggagaggaaatatcagatggcgttatactccttgaggaatttctcaaggtcggtaccctcgattttcttcaaggcttccttcaaagccagacgcgggatcagcggcagatccatgtcggtgatctttttgccgtcgcgcagcttcacggtggcatcgatcagggcgcgcacatcgtaggtgctgccccagacctcgggcacgccgcggtcaatgttcagcagggtgtacacggcctccataccggtgcgcatggagtactcggtggtaaagatggtatcgcgggcggtctcggcaaactggccaaggaaggcaaagttcacagcaccctcgggcacaacatcgggacggtcgcccatggcacggggcatgaagaaggcatcgatatagggcatcatcacaggcacggtgttggcgctgtgctctgccagttcagcgatctgatcctcgggcacgccgatgtggtacagccactccatgcagatctcgcggccggtgcagtcacgcataggctttttgacgtaatcgccgggcttatcgctgaacaggccgtacacccagacgcacagctggttcttgggctgatccttgaactgctgctgacggttcagcgtccagctgagcagccagctggagtccttgacggtgacgatgccgccggtgacggtgtggccgctgaaggggtcgcgcttgcagatcttgcggatatactgggggatcttgtcgtccagtgtggtgatggtagcgctttcccagttgctcagctccggctcggagcagaacttttccgggtgaccgaaggagggatcctgtgcggcgatcttcttccacagatcccagccgttgccgggctggatggtggggtcgaaaccggtggccttattctgtgcgcccacggtgcagctttccacgcagccgccgttggtgatgaacagcagatcgttctcggtcaggtcgatgttagaagtctcgcccgcgtgctccacggtgacagagcttgccagcttgcggcccttctggatatcgaacttgacatcggtgaccttggtgttgtagtggaactgcacgccaaagccttccagatagcgcaccatgggcaggatgatggactcgtactgattataacgggtaaagcgcagggcggtaaagtccggcagaccgccgatgtggtggatatagcgcttgaggtacagcttcatttccaaagcgctgtgccagttctcgaaggcgaacatggtgcgccagtacatccagaagttggtgttgagcacctcgtcatcgaagaaatcggtgatctttttatcctgcagctgctcgtccggggtgaagaacagcttcatgatctccatggcacccttatcggacaggccgaacttgccatcggtgtgggcatcctcgccgcggttgacggtggcacggcacaaggagaagttggggtcctccttgttcagccagtaatactcgtccagcacgctggcaccctcggtctccagagacgggatggagtgcagcagatcccacatgacctcgaagtggttgtccatctcgcggccgccgcgcatcacatagccgatatcgtacttgtagccatcgcaggcaccgccggccagtgcgttcttttcaaacacatggacgtgctcgcccttcatctgaccgtcacgcaccagatagcaggcagcggtcagcgcagccagaccggagccgatgatataagcggatttatgatccacaccctccggctttttgggggttgcaaaagcttcgtagttgccactggaatagtacataaaaaagcctccctgcttcaaaaatatcttttcacagccttcatcgtgctgttctctatggcaacagtataccccgcaaagtgaacttgaacaacaaacaaactttgcccggtgtatagattttttacatccgcccttatttgctggaaatgcgtacaaattgtgacataaaagcgatatgcaaaatctttcagcttagtcgttgccttgctcttgccattttcagcgggctcgccctctcagtcatcgctgcgcgatgccagctcccccaaagtgggagcccttggcagtccacgcaaagttcatctctttgccaaggcctctccctttgaggaaagacttcccccgcgccgggggaagatgtcgcgcagcgacaaaagggggagtgtggatttgcgaagcaaagacggagagggcgaggatgctccccatgtacaacaaaagagagccgccgcacaaaggtctgtgcagcggctctctatcggttttagttcatctcttccagagcctttttcaggttcttggcgatctggtccgggcagctggtgctgcggaagccgcacagcgtgccatccagacgggcaatggcgtcctctgccttcatgccggtgagcagctggcagatgcctttcaggttgccgttgcagccgccgatgacctcgatggatgcaatggtgtggtcatcgttcagcacaaagttggtctgcttggagcaggtgcccttgttcgggaaggaaaattccttgctcatggtctttacgtcctctctcttttacgtttttcggcgatggcgcgcagctgcgctgcggcttcgtccggtgcggtacaggtaccgatggggtgggggtgcttgtggttgcggccatggaagtccgtgcccgcagtggcaacaaggccgtactgcttgcacagggcaaggcactcggcgctgtcctccgggctgttgctggggtggtacacctctatgccgtccactgcgccctctgccgccagctcgcgcagcaggggcatacttttgtacaccgtggggtgggcaaacaccaccgcgccgccgctggctttagcggtagccagcacctgccgcaccggcagatactccggcgagtgcagcacgatgccccgggggttccacccgaacagcttgtggtaggtctcgccgtagatgctgccatcagtcaggcccagcagttccagcgcctgcatcagcccgcttttgaacagcactccgctggccttggtggtctcccacgcaaggtcggtggtaaactgcgggtacagctgctccagctcctttgcgctctgcaaagcgcaggcgttgcggcgctccttcatgacggcgcagtgctcccgcagcgccgggcagtccacgtccgggtagtagcacagcaggtgcacccggtgctggcgctcaaagtcgtagccggtcagctccacggcagggatcagctctaccccgtcctgcccggtgtgggcgtaggcgtactgggcgctgagcagggtgtcgtggtcggaaagggcgatggcgtgcagcccggtgcgggcggcgatggacgccagccgctcgatgggcacagcaccgtccgagcaggtggaatggatatgcaggtcacaggacatagcgggttacttccttagtgcttatagaaattgatcaggcagccgtcagccaggatctggcgctcgtcagtggtgagcggagccatgtacaactcgaactccttgacggtatcgcccaaaacgtaggccttgatgctctgcagatcgcccttgagtgcttcccgcacattggggatgagcacataatcccccagaccaaagggggtggcacctgccagctgcaggggcagcataccccagttgatcaggttggagcggtaacgcttggtggcgtactcggtaacgatattggcaccggcacccagcacacgctggcagctggcagcctgctcgcgggcagagccgtcaccgggcttgactgcaaagatggtggaggcgatctggatatcgttccacttcagctgctcgcagccgggcacggcgtttacctttgccagcagggcggcgttccctgcaccggcgcggcgggcagtttcctcggcctgcacggccttggcgcggcccacatactccgggtccttgcggctgagggtgaactcagccagacccaagggattagaacggtaggaagaggtctcgccggaggggatcagctcatcggtggtggtgacggggtcggtgatataggaagccaccttcagcagcaggttgtcgcccagcggtgcgatctccggccagtccttgatgttggggccgaacttgagcagggcatcgtagtcgcccttgccaaagccctgatacacgcgggtgtcgtagctggaagcatcgtactggtactccggcacggtgggatcgtaatcaatgtcggtggcgggggtcaggatgccgccgtttgcggtggtggctgcaatgctgcgggcatccatcagtgccacaccggacagctgaccgctgccgggcttggagccctcgcggctggggaagttgcgggtggtgtgacggatggacagtgcgccgttggcgggcacatcgcccgcgccgaagcaggggccgcagaaggcggtgcggatggtggcgccgctggccatcagttcgccgatgacgccggtgcgcaccagctccatcatgatgggctggctgccggggtaaacgctcagggcgtagtcgccgcagccgccggtgtgacccttgagaatggaagcagcctcgtagatgctgtcgtacaggccgcctgcacagcctgcaatcacgccctgatccacacgcagcttaccgttttcgatcttactgcacagatccagctgcacatccttgcggccgatcagcttctgcacatcctgctcgcaggcgtggaggatgtcctccagatttgcgttcagctcctcaatggtaaaggcattggaggggtgcatgggcagggcgatcatgggacggatggcagaaagatcaacctccaccacgccgtcgtagtaggcaaggtctgccggtgccagctttttgtagtccgctgcacggccgtgcactgccagaaaacgctgggtgacttcgtcagtctcccagatggaggacaggcaggtggtctcggtggtcatggcatcaatggcgttgcgggtatcctgccgcagggaagcaatgccggggccaacaaactccatgaccttgttcttgacgtagccgctcttgaacagcttgcccacaagagcaatggctacatcgtgggggccgcagcccgccggcagactgccggtcaggtagatggccaccacgcccgggcgagcaacatcataggtgcggcccagcagctgctttgccagctcgccgccgccctcgccgatagccatggtgcccagtgcgccgtagcgggtgtgggagtccgagccaaggatcattttgccgcagcccgcaaagcgctcacgcatatactgatggataactgccatgtgcgggggcacaaagatgccgccgtactttttggcagcggacaggccaaagcggtggtcgtcctcgttgatggtgccgcccacagcgcacaggctattgtggcagttggtgagcacataagggatggggaacttttccagcccggaagcacgggcggtctggataatgcccacaaaggtgatgtcatggcttgccatggcatcaaacttgatcttcagattctcggcatcgccgctggtgttgtgtgcctgcataatattgtaggccatggtgccggtcttagccgtggcaacggcagcggcatcaaagccctttgctgccagtgcagcgggtgcattgtcgtctgcgggcacccactcgccgcgcgcatagtacgcgccgccggtgctgcatctgatcatatccaacatctcgattcgcctctctttttgtattttcccgcccgccgcaattgcgggcattgccccggcagtgcggggtcacccctgccctgccctgttacggcaaagccgtatttatttgttattatagcatgaaaaggcgaaaagaaaaagcactttttatgaacccttactgtgcctttgcggcggcttcctgctgcttttccttttgcagtttacggaacaccacaaaataggccgggatcaggaagaagcaggcaaagagccatgccaccgggcttgcgatgcaggcggcaaagtagccccacagcggcacgaaccagaagcccaccatggcgcgggcgatcatttcagccacaccggcaaacatggcaaggccggagtgccccagaccctgaatggtatagcggtagatgataagcaccgccagcgggatgtagaacacgctgttccagaagatgaactcctgcgcattggccataatggcggtctcgcctgcgtccagaaacaggccgatcagggacttgtccagcacgcgcaggatgaggaaggacgctacactgtacacgcagccgatgcccagtgcggtgttcacgccgcggttcacacggccaaggtctttcgcgcccatattctggctggtgtaggtggtcatggcggtgccgatgctctccagcggcacgctgaggaactgcgcagccttgccgccggcggtctgcgccgccacgatgtcgctgcccagaccattcaccgcgccctgcagcaccacgctaccgatggcggtaatgctgcactgcaagcccatggggatgcccatagagcaaagttttgcacagtgcggtgcgctgatgcgcccttcttccttattccagcgcagctccgggtagtggcgcacgatataaagaaggctgccgatgcccgccacagcctgactgaacacggtggcaaaggccgcgccgaacacgcccatgttgaacacaatgatgcaggcaaggtccagcccgatgttcagcacactggccaccaacaggaaatacagcgggcgcttgctgtcgcccagtgcacgcatcagggcgctggtcacattataaagcagggtgaacgggatgcccgcaaaaatggtgcggatatacacatccgcaaggtcgatgatatcggccggggtgttcgtccacaccagcaccagccgggtcatagccaccgtaacgatggtaagcaccgtggcaaaggcgatggacagccacacggtattggcggtgtagcggcgcatctcgtggtggtcgtgggcaccgaaggtccatgagatggggatggaaaagccgcaggcaatgccgttgacaaagcccagcaccagataattcaggccgcccacgctgcctaccgccgccagtgcttccacgcccacgaaccgtcccacgatgatggtatcggccagattgtagaactgctggaacaggctgcccagcatcagcggcacagcaaaggcaagcagcagcttcagcgggctgccctgcgtcatatctttggtcatggaaatatacctcctgcccacataaaaaggatggatgttcgcatttttgccgtgaaaaacgccctgccggaaaagcggcaggacgttgtaaggattcatgagtggtattatagcggagcagcgccgattttacaagacttggtttgcatcaacatttccatttttttgcgtaaagaattggtgattttgctcactccgcgtagtgtgccagaaactgtttggtgcgctgctcgcgcgggtggtcgatcagctgctttgcaggaccctcctccaccaccacgccgccgtccatgaacaggatgcggtcagccacatcccgggcaaagtgcatctcgtgggtcacgatgatcatcgtggtcttgcggtcggccagttcccgcagcacccgcagcacctcgccggtcagttccgggtcaagggcgctggtgggctcatcgaagcagaggatgtctgggtgcagcgccagcgcacgggcaatggctacccgctgctgctgcccgccggaaagctggtgcgggtagtggtctgcccgctccgaaagccccatctgcgccagaagttcccgcgcctgctgttccagctgggcgtgcaccgcctttttgttggcgcggtagtccgggcgctcctttgccagcagttcccctgccagcatcacgttctgcaaggcggtatactgcgggaaaaggttgaagttctggaacaccagcccgaagtgcagccgctttttgcggatctcgctctcccgctgggtggcggggtcggcggcgtcccacatggtctcgccgttcacacggatgcagccggtgtccggccgctccagaaagttcaggcagcgcagcagggtggtcttgccggagccggacgaaccgatgatggcaagcgcttcgccctgctccaaagtaagagaaatgtcctttaagacctttgtatctccgaaatttttgccaatgccggaggcttccagtaatgccatattcttaaaaacctcctcagcagcggaaataatccagtttcttttcagcccagttgaacagcagggtgagcgcgcctacgaacacaaggaagaacagcgccgtggagaacagcggccagatcaggccctttgcgctgtactcctttgccatcatgatgatctccttgttggcgatggtgtttgccagcgaggtatccttgacaagggtgatgatctcgttgcccatgggcggcaggatgcgcttgaccacctgcaaaagggtgaccttgaaaaagatctgcgtgcgggtcatgcccagcacctgcccggcttcggtctggcctttgggcacagcctcgatgccgccgcggtagatctcggaaaaatagcaggcgtagttgatggcaaaggctaccaccgccgccaccatgcgtccgccggagccggagggccacgggttattcatgcccagcagaccggggccaagataaatgacgatgatctgcagcatcagcggcgtgccgcggatgacccagacaaaggtctttaccgcgccggacagcagcctgcaccggctcatggagccaaaggccaccaccagccccagcggcagcgcaaacagcagcgtaagggcaaacagctcacaattgagcaggaacgcgccggaaaggcgcccaaggatcacagacacaaaaacacacccatctatcgttttgttttacgcccgactcagtccgccagcgccagctcgtacttctctgccagtgcctgcatggtaccgtcagccttcagctcgtcaaaggcggcatccactgcggcggcggcatcgctgcccttgcggaacgccacgccgtactcctcggcgttcagctcgtccacgatcttcaggcttgcgtagtcggtgccttccccgatcatggcgttggcaagggtcagatccagcacagcggcatctgccgtaccggcagccacttccatcaggcagtcggtctgcacgctcttggaaacataatcggccttggcgaggttttcatcgccctgaatggcggcttcaccggcagaaccggcctcggccaccacggtcttaccggcaaggtcggcggtggaggtgtaggcggtgccctccttgaccaccacgacctgtgcattcttggcgtaggccttggtggtggcggtgtttgccatgatatcttcggtcagggtcatgccgttccagatgcagtcgatgctcttggcgtccagctccaccaccttggtgtcccagttgatctccacgaactccggctctacgcccagctttgcgcacacagcggtggcaagctcggtatcaaagccggtaaagttgccgtcggcatcggtatagttcatgggctcgtacacggtgtagccgatgaccattttgcccttgcccttgatgtagtccagatcgctgcccgctgcggcagaagccgaaccggctgcactgccggaagcagaagccgccgcagaggtggatgcactgccgccgcaggctgcaaggctcagtgccagagcaccggccagaaatgcacttgcaatacgcttgagtttcatatcttttcctcccatgggggacgttctgtgtcccgcttccctctcgttttaccattttaccatgctaaagtggtaaactgtagctatagaatagcgcgtttgccgccgtttggcaagaggaaaccttcattttttgcacaatgcactgctttgccccgcccgtaagcccgctttttgtgggaaaatgtgcataccccttccgtctttgcgcctgagagggcagctgcaaataccccttccgtctgctcactgcgttagcagccaccttccccaaggggacggcttaactccctcagtcaaagcctgacggctttgacagctccctcggagagggagcctctggcgtatccgcaaactttgtgcccgaaccggaaactttaccgccatgccaaaggccccatcctagaggacgactcccccccgctccgggggaagatgtcgcgcagcgacaaaaaggggaatctgtcgccgcaggcgactgggggagtatccgcaaatgccctcccgtgaaaatgagatagcggagcgtccgcagacgctccgctatctcgaaataaaaataatttttccgctgatcatgcccaaagcgcacgcggcgggcattccaaatcgtcctctactgctccgccatggccttcagcaccgccttttgcaggtcggtgaccgagatggtgcacagcgccttcaggtcggcatccgtgccgtctgcggagagtttgccgatctccacggcgtttttgcctttcaggtagccgcaccagcctgcgctgtgctcgtaccactccttgcctaacgcgcttgcactgcgcatcccgtaacggtcgcccagctcgtttttggtgtacaccggctcacgcggggcagacaccgtgccgtccgcgctgacggtcagctccggctcggtcatatccccgatggcgctggtcacccgggcattctcgtccatggtcaccactgccagcgtgatcttagcctgcacctgtgcgtccttgtcgtcggtgcccacaagcccctgcggcagttctgccacctctacgcccagcttgaccgtatcgccccgggcagcgcccagcacctgtgcattctcgcaggcgcggacaacggcatcccggtagcggtccaccgcaatggtgcagccagagagaaggtctgcgtctgtgggcttgccgtctgcatccgttttcagctttttcacttcctccggggtcttgccctcaagccagctgccaaaggcatcggcctgctctgcccagccttttttcaggccggacacctctgccagcgggtagtccttccccttctggcgcttggtgcgggtgtcggtaggggtggtcaccttgccggtgccgtccgcgctgaccgaaagctccagctcgtccagcgtcacccccgccagcttgccgtctgcatccagcagcacggcagccgccacggtgcggatattgcccgcacggtctgtacctgtcgcttcggtcagaacgcccagtccggtgcgccacgccgcgctttgcgccgcgctgctgcccgcagaggtgctgccgctcatagagccggagctgctgccggagtttcccccgccgcagccggtcaatgccagtgctgccgccagcgtgcagcacaaaaaccatcgcgatgcctgtttcatatcgtcacatacgctccctttccgtgcctgcattgctaacgcaggctttggagccagtatgccccgccgcgcgggattttatgagcaggcagttacatcaaggggcttaacagccgcagcacgctgtccagcaccgtaccggccagcccggtgcggcagtccgcgcactgcacctcccggcactggggcagggtgcggcgcacatcgtcccgcaaagcaagcacctgactgttttgcagcagcagcaccccacactcgaagtgcaggaacatactgcggtagtccatattgatgctgcccaccaccgccgcgcggtcatcgctgacgcagcacttggcgtggaggaagcccggggtgtactcgtagatgcgcacccccgcccgcagcaggggcagatagtacgagcggctcagccggaacaccagctttttgtccgggatgcccggcagcaccagccgcacatccaccccgcgcttggcggcgttgcgcagtgcgtccagcatttcctcgccgatggcgagatagggcgtataaaaataaacgtactgctgtgcttgtgccagaatatccagatagacggtttctgccaccggctcttcgtccagcgggctgtccgcgtagggctgcaccaccccatcgctggcgggcagcaccgcaagctgcggacggaaggcgctgtaatcctgctcgaaggggcggaaggcgttccagaaatccagaaacatcacggtaaagttccacaccgcagcgccctcgatgcgcaagcccgcgtccttccagtagccgaagcgggtgatcgcgttgatgtattcgtctgccagattgatgccgccggtgtaggctactttgccgtctatcaccacgatcttgcggtggtcgcggtggttcatcaccagcgaaagcagcggcaccaccgggttaaaggggatgcagcggatatgcgcccgctccatgcgcaccacaaagtccttgggcagacccagcaaactgccaaaatcatcatagatcagccgcacgtccacgccctgcgcggctttgcggcgcagaatgtcctccacgccctgccacatcttgccctgactgacgatgaaaaactccagaaagatgctcttttccgctttttcaagatccgccagcaatgccggatacatggcttcgccgcaggagaaataccgggcggtggtgttctgccatgcgggatagcagccgtattgggtcaggtagcggctcacgccccggttttcatcgcacagcccggcagtctgcccgggctgctgggcgcggtctgcgcggtgtgcctgctccaccgcctgcattttgctgcgcaggcggcgggaagggcgcttgttgccaaaggccagatacagcgccccgcccagcagcggcagcagcccgatgagggcgatccagcccaccttataggcgctgttttcgtccttgcgcaccagatacagaatgatcagcaggcttaacccgttgagcacccctgtgacccacacccgcgccgtgccggtggtgagggcaaaaaacacccacgccagccatgcaagctgcagcgctaccaacaccaccgtgaccgtgatgcggttgaggatgcggttgaaaaacttgacgatcggcaaccggaacagcataccatctcccctttccgtgtttcaatacggttaagtataacgcggtttttcaccctttgcaagtttttggtgtcgggtgcaccggaattattcctcgtaaaaaaattcaccggagcgtccgcagatgccccggtgaatcaagatcctattctatattttctgctcagacggtcggtgcttcgttatcctcgtagcccaccatcaggccgccgtactccgcatagtagctgcacagcgcgccgcaggtgcctacctccaccttggcctccgggaacacggcatggaccatgtgcttcagccgctccgcagcggcagcgttgcagcagtggtcgatgtgcacccggccgttggtcaggccgtgtgccttcatttccagcaccatgcgctccagtgcgccgtgctcgccgcgggtcttgcacagaacctccagatcaccggcatcgctggcctgcccgatgacccggatgcccagcatccgcgccacagcagccacagcgggcttcacgcggccattgcgggcaaggtttgccagagattccagcgcaaacagcagatgagtgtgctcatggtacgcccggatctcctcacatatggtatcaaagggcttgccggccttgatcagcgccgccaaacgctccaccagcagccgggactccgcaccggtggacaggctgtccagcacaaagacccgcgcgccctcgtggctctgctcgtattcctcgcccgccagcagcgcagcgttataggccccggacagcgtaccggtaatggttacaacatacacctcgtctgcgccctcgtaggcggtgagccagtccgagatattggggcaggaggtgctggtgcggcccttataggtgcgcatcatctgagccagcgcgggggcatccacctctgcggtgtccacatactcctgctcgtcggtcaggatcttcagcggcacgcaggcaaaatccacatcggggagctggtacacatttgcagaggaatctacaatgatcttgcttttcatatttttctccactttcaagcggcgcaatgccgcggtcattcctttgtttgtgaccatcatagcagtttttcaaaaccctgtcaactgttttttcaaattcttttacaaagttttcgttgcccgttgaccaatttttcaaaatgcggtatactattttacaggcagaagtgcttttgcggaaagcaattgccctgcctttgcacaaaaacaacgttcctgcttgcaaaaagtgcaggagcatgaacggaacaagatactatgaaagctgaaaccaaactccgcgttgcggcgtgtgctgcgggctttgccctgccccggtacaacgatctcccctcggtagggctgtatctggaccagacggtgcagttcgtcaacggctacttccgcagcttctgcggggtggaactgaccccctctatggtaagcaactacgtcaaaaaaggggtggtggatcaccccatccgcaaaaaatacacccgggatcagatcgcatccctgatgtacattgcagtctccaaaacggtgctctcgatcgaaaatatcgacaccctgttcaaaatgcagcgggagcactgctccgccgggacagcctacgatatcttctgcgaggaactggagaccagtctttccgtggtgttcggcagcaaagccgcccagccggagacggtgctcaacgacgagcgtctgctgctgcgcagcaccatttttgcggcggtcaacaaaatgtatctggactgctgcttcgatgccttgcggcaggagcaggctctgtggtcggatatcctgccggatctggcgtgacaacacagcacggaatagcagacatagcaaaagccacctaaaaacttacgttttcaggtggcttttttactggtggacgggctgcaacgccggacgaacgcatacttgaaaatatcgctgcatagcgtcactattgtgctttctattttaccgaaacgcatccatcactaaatcattttgcagatgcgggaacaaactcgattttaactttcattcccattccggctgcaagccgctgtagggtgcgaagcgacggattcgcgtttccacgttccagcttgctgatgtcggtctgtgcaatacccgtgcgctccgagagctgcttctgggtcaagccgctttccttgcgcgccttgagcatggcttcgatcacggaaaattccgggtcaagtgcgtcccattcggccttgaattcagggtctttcatctgttcattcaaaaaatcattgaagtttgtcatttggagttctcctttcgggtaagatactctatgcgatattgttttgccagtgtgatctccgaagcaggtgttttctgagtctttttgataaagccatttgtaaggatcacccttttaccgatcacgaagaagtacagcacacgggtgatgtctgagccaaatttagtgcggatctcaaaaattccatcgtccagtgctttggaatagggttctcttaaaaatggcccttcttcacggagcagggcgactgtacgcaaaaccttggcctgcattttcttatccagactcaggataaactcttttgcaggctcagagccatcgggcttatcgtaaaattcaatttcatattcctgcatggccgtacttccttcaaatagcggatttatctcatatccagtatagcggatatatcctctattgtcaagagcgtatcgctttacatattcgttcctttataggacgataatggcattttaaaccacaaagggagaacactatgactttctgtcgatttgtagcgccgtgtttatctgccgcaaaaataagagcaagcgcatccgatactgtccagaagcaggatcaaatacgctcgcaatttcaaaaacgaaatgcaacctaaaatgtaaccggttacatttttacaaaaaaaacagccagaaatcaacaaaactacgttaatttccggctgctgtttggtggagcgaagcaacccaaatccgaaccattgccttctggggcatctttggcggcgatttcatcgaaagtgatggtttttgtgccgtctttgtagttgaatgcaatcaaaactttttcatcatagagataaacagcattcacgaatgtattgataagcgtttcccggtggcttttcacgttcgggtcgagcttgcggaagttggtgagccaaaatttcacaaattctgcgctgactttcggtttcgccagcttttcttccgcgatgcggatttccagctctttctgctgggcttccaacttttccaagcgtcctttggtcgagctggtcagcacacctgcctgaattgcatttaacagattctcgatgccgttctctatatccttcatctgcttttccagcaggggcagcaccgtgttctcctgttcctgaagaatcatcaccgcatccacgatagactggatgcagtcatcgtcatgaatcatcttcatggtctcgttgactaccagatcctccagccactctttgcggacggtctttttcttgcaggtcttggtgcgcttggcatttgcacatttataataatggtggacgttcttattccggctcgttccgcactcgccgaacatcatcgcaccgcacattccacagaacagcttggtcgtcagcaaataatcgtcctccgctttgtgccgagccggagcgcggcggtttttggcgattttatcctgcacactatcgaacagttctttctcaatgataaccgggatgctgtccggcatcacaatgtccttaaaacgattctcgccgatataacggcggtttgtcagcaaggtctgaatactgttataggtaaacttctggttgcggttggtggtcacgccgctgtcgttcagccagttcatcagttctttcatggtcgcgccatcgttgtaccgctgaaaggcttctaccacaaaaggagctttcaaagggtcaatctggaagaacttttcttcgtccaccgtatagccgatgggaatcgttccaccattatatttgcccttcagaacattctcagtcatgccgcgcacgaccttttcagaaagttctgcggaatagtattcagccatgccggtgagcatacttttgaccataatacccgctgggccttccgaaatcggctcagtggccgataccagcttgacatggtttcgctccaactggtactcatagtgtgccgaatcataacgattccgggcaaagcggtcaagtttccagaccaacacaatgtcaaacaaccgtttctcgctgtccttgatcatctgctggaattccggacgattgtccgttttggcagaaagtgcacggtcaatatagtgcttgatgaccgtgatgccgtttttctcggcataggccgtacattcacgaatctggccttcaatggattcttcgcgctggttatccgatgaatagcgggcatagatcacagcggtcatggcaggcacctcactttacacatcattaaacggcgaacggttctttcaaaatgtagtttcgtataatatatataccatgttttacaacggtttgcaatgggaaaatcagcggacagcatttaattcttttcgtaaatcagatgcccaccgacctatggttttcgccataagctggtgggcatctgttgttctggtttataattcactgatggttgcagtaatgggctgcatgaggatttgccttaccgggttatatactgccagcaccacagccgccagcacgactacgacaatcacggcaagacagccccacggcatctgccacgctgcaccgaaataatgggtgatgagcaggatatacagcttccgattcagcacaagacccagcgcaatgcccaccacaagaccggacaccgcataggtgccagcttcggcagagatcatgcgtttcagctgtgcatcatccatcccgatggcacgcaggatgccatactgcttcattcgtgccgacacgctcatggaaatgctgttgacgatgttcagaatggtgattcctgcaatcacgaggagaaacgcatagaccaccagatggaacgcccagtaggtgctttgtatcatccgatttccttcgattcggttggaaaaaacaacctgcttgtttaacgtgtcgctcagcagggtgtgtatttgtgcaatggctgcgtctgctgtggtatcttttagttgaatatcgatcaccgcatagcggttttgcccggtcagctgatggaaggtttcttcggtgcagataacaatcggggaatcggtactactgaacgggctgtcgttcaatacacccacgactgtgagctttgcatcctccagctggatggtatcacccacggtcagggagttgcttttgtcgaataccgtcagcacagggtatgtgccatcctccggctcctgcggaagggttccgccaatcaggtcttttttcgcccagccaaactgtatcgtatcgtatgaaatcaggtcgatggacccctgttttccctgatattccgccgggagcggacaatacatccgcccgaatgcgtgtttgacttccggcagagcttccagctgctccaccagtaccgggtcaaggacattttgcccggatgtttcagccaccgataagtccggtgtgtagggctgcaacggattcagcgcaaatccaacccatcgaagcaaaaccgaaaagctcaaaaacaggagaatgcttaacgcaaaggaacctgtcatcaaaagcaagttctttttggacgaggttgcatggctcacgcccaaagaaagctctgcacgacttccaaacaaccgagcatgacacggagaatccgctgcattttccaccgcattcccagttgctgctgtgatcggagaagcttttgccgcccgccgtgccggagaagatgccgcgagccaaaccgtgataagtcccagcacggaaccacagataataccgaccgggctgatgccaagcactggtaaagagctgaactcatcgccgataaatccacgcagaaaggaacacaatccccatgtggaaacgattcccagcacacatcctgccggaacagcagttttacaccagaaaagagcttccagccggacaagcatccgaacctgattttttcctgccccaagacaacgcagcattccataatagctggtacgctgcgctacattgctgttgatgctgcctgtgatcataaaaattccggcaaggacgaccatgccagccaacacagccgctaccgcatataagcctacaatataatcgttgttgctgcttgcgttcaacgccatcaggtaagtattttcggagattttttcttctgaaattccgtacttgttttcgatgttcacaatggactgccgcaaattggtacgtggcttgaactggatgaaatactgtgtttcaaaggattcttctacctgtgcggcaatctgagaaaatgtactgcggttcatcaccagcacaacagcatcatactggttcgcatcggaggtatcctcattgaaacctgcgacagtaagcgaaatggtctgtccatccgggagcgtcagcggaatcgctgtaccgaccgtaacatccagccaatcccggatgtttgttgtcacaagcacttcgccatccgccggggcagtgctgcactgcattcccggaaagatttgaaggattgcatcatctgctcctacaagtgcggcacgtttatctccggcaaagtagttttccgtaagggaagcgttgatgtcgctatacgccgaaaatgcagcaacatcctcctgtgcggcaagctctgcggctgtttcaggggagatgtcctttaccatgatatgccagtttccgtttttgttcagctggtttgaggtttccatccgaatcgccatatctgccatactgaacaccgccgtgaccagaaacaccgcaaggacgatgcacaaaatcgtcatgcggttctgccgtctgcgtaccttggcagaaatcgggatcaggctcagatagcttttcatttctgtgctgctcattcccggcacctcccaaaatcggtcaggcagccgtccgatacctgcaacacccggtctgccgtctgcgcaatgctgcggttgtgggtgatcatcaggatggtctgctcgtatttccgggatgtttcttttagcagggcaatgacctcgctgctgttctgggtgtccagattgccggtcggctcatccgccaaaatcagggaagggcgggtcatcagggcgcggccaatggctacccgttgctgctgcccaccggaaagctgacttggcagatgcttccgacggtctttcagattcagcacggtcagcagttcttccagatatgccttgtccggcttttggtagtccagcagcaccgggaacaggatgttctgttctacggtcagttccgggatgaggttgaatgcctgaaagataaaaccgatattgcggcggcggaagatcgtcagctcccggtctttcatggcaaaaacatccttgccatcaatcagcaccttgccggaagtcggcgtatccagtccgccaatcagattgagcagggtgcttttgccggagccggattcgccaacgaccgccacatattcacctttcggcactgaaaagctaacatctttcagcgcatggacagcagtttctccgctgccgtaggtcttgcagagatggttgacttctaatagttccatagtgtatccctcactttgcaggttccttcgattcagacggattatctctgtctgtgcagaaaaggataacacgtcaaccttactgcaagcctacactcagcctacaattttgtaggaatcggaaaattcagagtaaaggtcgtgccctttcccagctcgctgtctacttcaatggtgccgtgatgggcttccacaacggcttttgccagcggaagacccagcccgatgccctgtgtatcctgtgaaaagcggctgcgataaaaccgtttgaagatatggtacaaatcttccgggtggatgccgctgccgttgtcgcgcactttgatctgaaccatggacggcagtgcattccactctacctgaatcgtatctccgctctttgtgtggtcaagggcattctttacaagattgtccacagcttcctgcatccagtcacggtcgcaccaaagtgtaaccgcctctgagccggacagaacaagctttttctgttcctgctctgcacgatagtgatactgccgcgcgatgtcctgcaccatttcagcaacattttcgtttttcttctccaagacgaccgaaccggcatccagccgggtgattttgagcagattctgcaccagcgtttcgatgcggtccaactcctgttcggacaggtctgcaaactctttgacctccgacggcgaaacaacttcgtcctgaagcagaccgttgtagatattcaacgccgccagcggtgttttgagctggtgcgaaatatctgcaatggtatttttcaaaaaacgcttctcccgctgctcgttgtctgcgtgtgcgctcagaactgccgccaatgcattaacggagtgaaacagacggtaaaattctccctcccggtcgcagtccagtcgtgcatccgggttgccatccagacagctttggatttgctggactgcctgttccagaagcgcgctctgcctttggaaatagcgaaaaagcacgccccagaggcagccgcccagcagcagaaaagccaatagtaacccgaaagaaaacacatgcgtcgtatgccatacgatgccctgcgtgagagccaatgccaccgcccagactgccagcactgtccggaacaaaatccggatttcccggtttgcgaatactttcatacggcacctttacccattccatttatagcccatgccgcggacagtcagcaacatctgcggtttgccggggtcgtcctcaatcttcatccgcagccgccggatatacactgttaaggcactgctgtcaatgtaatccccatcgcagtcccacagtgcatccagaatttgttccttggatagcacagcattcggatgctgcataaagaagcagagcagcttgtactctgcgccggtcagttccagcaagattccgtttttgtacgcctgcccctgcagcagccggacggtgatgctacccgattccagtacgggttctcctgcgctgtacgcatttgcacggcgaagcagtgcattgacccgcgacaacaggacacccagcttgaacggcttggtcaggtaatcatccccgcccagttccaaccccatgatgatattcatttcctcatccgaagcagtcaggaacagaatcggcacgttggatgtgcgccgcaccttctggcagaaatcgaagccagagccatccggcagggaaacatccagcaccagcaggtcatattttctgtctgaccacagcgcctcggcttctgccagcgtccgggctgtatccagtgcaaagccctgtttcttgaatgcaaaggtcagcccactgatcaggctcagatcatcttccaaaaggaacagttttctcatgattccctctcttttctgcgttttgtgtgtcctacaggttcaaaagcattataagttttttctgcgaacattacaatgtgcgaaacggaaattgtttcttgccgtgtgttaaatataagtcctactatcacaactttatcgcaataaatttcacaaaaccatcttgacgcaccctgcaaaccatgatattctctgtcacaaatcccaccgattttgtggattggtttgaaaccatccacaagatatggtcgtgttcattttgaacactgcctcgccgtggatcatccctgaaagattaaccgccccgcaacacacccgattcattttgccgccgattcacccgacaaaatcatcgctgcgctgcgtgggcggtatttttctttttcacaaataaaatcttatgtagttgttcaatcttccaaaatttgtttttagttgttgactatacaaccgcaaagtgttattcttgtgcttgaaagaagcaggttgtagtgtccgcactacgtccggctttcttcataccgaaccttgaatccttcataagccgtctgaacgagatactgcgccatgacctcacactttgtgtgggcgagccggacaacgccgctgcaaaacaggggcaggaacttcgttcggagcaaacggtaatccccttacatgagcagtaccacctctacttatttttgcgtcttaacaattcggaaacaactttcggaaatgcgttttgagcgcagcggtggagagcaagaaccgtcccgtggccacaaattttcaattcttgaaaatgttgtgctccaccgggacttcacatctgcaactcttgcgagttttgatgtgatcttgttggggcgtacctgccccaaaccctgctcatattcgcaccttgcggtgcgaaagaacggcgtgtcgtgcttacatagctccaccgaggagctagcgaaacgacaggaggttcaatgaacaaaacgaatgtcaaaacgaaacccagcacgacccaccgccacgacacgccgaacaacaaaacgcacatcatcaagttccgtgtgacagcggaggaaaaagcgtcactggaactcacttgcaaacttctgaatctctccctctccaccttcatccgccgcgccatccacaacgtcaagatcgagaaaacggtcatcgttgcaggcggcggcgaagaaaccctgaccactgtttccactttgcttgctcagtgcagcaaggtgggcggcaacctcaaccagcttgcaaggcacttcaattccggcggtgcagacaccgagcagatccgggcgaaaatccttgacgaacttgcagacctgaccgcattccggctcagcgccgagaaagttctgggtgaactgtatggcaacgctcaagcatatcgcctcagtcgcaagggcggctgcattgttcaaccataaaacgcatatttgcgacatacaattcgatgctgttgccaacgatttgaataatcgaattgtaataaaaactcggactactctgccatcgaagcgtacctcatttaccagcacgatgcgttcaccgggaagcaacttttggatgaacagggcaagccgaagctgcgggattcgtacgtcctcgatacacttgagtgcggtgatttctcatttgcaacggcctgtctgctggcaaaccgcaagtatggcaagaacacccagcatggtgatattaaaagccaccagtatatcatcagctttgacccaagagatgcagccgacaacggcttgaccatggaaaaggcacaggcacttggcctgaaattctgcgaagaaaacttccccggtcatcccgccatcgtctgcactcacccggatgggcacaacagtaccgggaacatccatgtccacattgtgatcggcagcatccgaacacgagaagtggagcgcaaaccctatatgcagaagccccgtgactggctagagggcatgaagcactccagcactgcccagaccatgcggcacttgcgtgtcgaggtcatggagatgtgcgagggtgccggactgtaccagatcgacctgctcaacggctcgaaagagcgcgtgagtgaagctgagtattgggtgcgcagacgcggccaattgaaacttgaccgtgaaaacgcagccctcaccgcagctggacagcagccccggcagaagaagtttgaaaccgtgaaagacactttacggaaacagatttcttcggtgctgtaccgtgctaccagctttgaggatttttccgacaggctcatgcaacagtatagcatcaccgtcaaggaaagccgtgggtgtctgagctatctgcccgctggcagaacgaagtttatccgagcgaaacatctcggtgacaagttcgataaggcggcagtgcttgctacgttgcaggcaaacgccgaacgcaagcccaaggcgcagttcaagcaagataccatcgggaaactgattgacattcaggcaaagctggccgcgggcaagggcacaggctatgagcgttgggcaaagaagtacaacctcaaagccatggcacaaactctgatcctcttgcaggaaaaagatttgctcaacgaggacgccctgaaccagcgcatcgccgaactggaaaccaagtatcacgacgcactggcggtggtgaaagacctcgaaggtcgcatgaaattcaacaaagagctgcgctatcatgtcgcagcctacaccagcaccaagaatgtcgcacagcagctaaagactgccaaacgacccgcagcctttgaggagcagcaccgtgcagagctgacagcgtatcggacggcagcagcctatttcaaggcaaacgaccttaccaagctgcccagcccgaaaaaactggaagccgagtatgcgcagctggcatccgaaaaggcaaagttctacgagcagtacaaggaagccaaagaggaactgctcaaactgaaaaccgcaaaacagaatgttgcgtcctttttccgggaggaagaacagacgcagcaggagagataaaggagtgtgcgtatgatcaatctgaagatcgacccggagttccagtcccagattccccctctgaccgatgatgaatttaagcagcttgaagaaaatatcctcaaagagggcaagctgctctctcctttgatcgtctggggtaataccattgttgacggccacaaccgttatgccattctccaaaagcacccggagatttatttctccacgatgccgctcccgtttgaaagcagagaagaagtcctcgcatggatctgcaagaatcagttggggcggcgaaaccttacaccggagcagaagtactacctgatgggcaaacagtacgacgccgaaaaagctgcgcacggcggtgaccgcaagagcatcgatgcaaaatcaagttcgctaaaagcgaacttgatcgacagcaccaaaacctgcgaccgaatcgcagaagaaaacggagtaagcaaagacaccgttatccgcgcctcaaagtatatgagaggcgtagagattgcagaagaactgatgccgggcctaaagcaaagcatcctgtccggacagacaaaagtgtccaaagcggatatgcatcgccttgccaaggcggcctactatgaccgcacacaaactttgcaggatattctgcacccggagctgaaggtggaaccgaagcctgacgctgacggtgtgattcgcgttccgggcaaagctcctgtcatgccattccgaaagtttgaatcggtttacgacagcgatgcttacccggaggatgtacggtacgagtatgtggcgttggaagaactcactactcgtttccgcatttcgttcaactaccagttggagcagatgcccgataatgcgcagcgcgatgtgattctggaaatcattcacaagcacaaggactaccttacttctctggaagccgcactcgcagatgttaaagaccagacagcataacatcaggcacatggtatgctgttcacagatgtccaaaggagcgtgcgtttgaacaaaaagaaaaagtccacaaacacttccccttatcccgatgaagtcatcgaccgtctggcacgggcattctacccggccatccttgcctgctggaacagcgaggaaggccagcgggagtttgccgcgtggcaggcggaacaggctcatcatgcccccagtaaagaaaaacagagcgttcccgactgctgggtatccgtaaaacagttttcgagaaatgacacggcaactgcctgtcaggattggttacggagtacccggctaggccgaggaagcatcaagtcccatgtccgcaccgttaaggtgctgggtatgggactttttgcatttcaggaacgtgtacacctctggaaaggtgtaacacactagactttgtaccaaagtcgtgtgccaagggtgctgcgcccctttggaatccctgcttacatcgcccatgggcgatgtggattcgccgcacaaaaagctctcacaaatgcacacccggctgtctgcggcgaggagaaggcacttctgcggaagtgtaataacccactataacactttcatccctgcggtctgcaaagtgtagtgggctctccgagggggaaacggctgtatagggtgcgcttcgggcaaatcgctgcgtacgtgcgtaccaatctctcgtacgcacgtacgcagtaaaacggctaaaatctcctatataggggtgttcttctggaaatcaatatgatatactcaacttgatcaaccatcaactaataagaggaggtaatattatgggaaaaacttttgtgtgcagcttatgccgtaatggaatcattggcggtggtttgtacattgatgaacagagcattacatattccacccaaaagcttacagtcagtccgctatatcgcagccttgtattgcccatgaaggagataaaggagatttcatggagccagatggtcgttcctgttgcagcaatttccatgaaagacggagaatgttataaatttatcatatataacaaatcaggatttgaaaaggcatataagcaatatagcaaccaccaagaatgaaatcacctggcagggtttggggcaggcacgccccaacaagaagctgtcccaaaggggcaggaaattttcaagaattgaaaatttgtggccacgggacgattcttgctctcacgaaaatccatactttttgaaaaaacgctttctgcagccaaaggaggatgcaccatgaaaaaagagattgaagcctttgtcaacgcagccaacgagcaggagttggaagccgcatggaacaacctctcggcagaggaacagcgagttttcgagcagctcatggaggaagactcacccgaagatgcactggcatttttcgcacagctgtatgacgataccccgaaagagcagtccagcgagaccgtgagcatctccgaaaatgaaatctatttcaagcggcagcccttgaccgaagagcagaagaaacacggctcttatgtggacgagaacggcaacctccatgtcaagaacctgtccgctttctggattccagaattgaccaccacggagaaagtcggtcacaccacctacactgtgaccggcagctatgagggcaaggaatcctttttgaagaagctggagcgcattgtagccaagaacgcccagcaaaaatttgaagatgagggtgcagacgaatgacaactgcgcccaattctgctatacttgaaccggtaaccaatcctgtaccgacagttgctccacagagtaaggaggacacaacaatgtctggagcaacgaataaaatcaccgcactttactgccgactgtcgcaagaggacgcacggctcggcgaaagcctgtccattgagaaccagaaggctatccttctggaatacgccaaaaagaaccacttcccgaacccggtgttctttgtggacgatggctactccggcacgaactatgaccgtcccggcttccagagtatgctgaccgagatcgaagcggggcatataggaatcgttatcacgaaagatctgtccagactggggcgtaattctgccttgacaggtctgtacaccaacttcacctttccccagtatggcgttcgctacattgccattaacgacaactacgacaccattgacccgaacagcgtaaacaacgattttgcgggcattaagaactggtttaacgagttttacgcccgtgataccagccgcaagattcgggctgttcagaaggccaagggagagcgtggagtaccgctgacggtcaatgtgccgtacggctatgtgaaagacccggagaacccgaagcattggcttgttgatccagaagcggctgcaatcgtgaagtgcatcttctccatgtgcatggaaggccgtggcccgacccaaattgcaaaccaactgtgggtggacaaagttctgactcccaccgcctataagttgagccatggcctgagtacgaattcacccgccccggaagacccttatcgctgggataaaagagcagtaagttcgattctggaacgcctggagtacactggctgcacagtcaactttaagacctatactaactctatctgggataaaaagagacatctgaatcccgtggaaaatcaggctatcttcccagatacacatgagcgcattattgacgatgatgtgtttgaaaaggttcaggagattcgcagccagcgtcaccgtatgacccgaacaggcaagagcagcattttctccggtatggtctactgcgctgactgcggttctaagatgcaatatggttcgtccaataacagggacttcagtcaagacttctttgactgctctctgcacaagaagaacgggagcaagtgcaagggacatttcatccgggtaaaggttttggagggccgtgtgctaagccatgttcagcgggtgacggactacatcctctgtcatgaggactacttccgcaaggtcatggaggagcagcttcgggtggaaagcaccgaaaagctgactgtcctgaagaagcagcttgcccggaatgagaagcggatcgcagacctcaaacggctgttcatgaagatttacgaggacaatgttaacggaaagcttagcgatgaccgcttcgacatgatgagtcagagctacgatgccgaacagaagcagctggaagaggaagttctctccatccagcaggaaattgaagtacaggaacagcagatcgagaatattgaaaagttcgtccagaaagcgcacaagtacgttcatattgaagaactcaccccttatgctctccgtgaactggtgtcggccatctatgtggatgccccggataagtccagcggaaagcgggtgcagcacatccatatcaagtacgatgggctggggtacatccctctggatgaactggaagcaaaagaaaaggcgtgaccgaagtcacgccaaatcttccccatttcgggagcttttgcaaatactgttttatgggaactctgctacggggaacgccctgttgtacatatcgctattgtatgtggattttggcagggtgcgtcctattcagggcgcacccttttttctttgttatacgcccgatgtgcgcatctgcgtactttcatgggaggaatcgtgtcaatttgacacaattcctccgtagcagttcatgcgggtcaagctgcaaaataacgctcggcatattccaaggacttttccagaaattcctgcaacttatccggatcattatacatcccatggttggacttcggaaattcgatatagtcgtatggaacgtcgtgaagaatgtacgcttccatgagataatttttttggctcacggggacgcaatggtcgatccgaccataggcaatcagtgaaggcacagagtcatcgctcacgatgcctgccggagagatcttccggatctcctgtgtataatcgtccagttcttttccggtcatcatcttgcagaagtcgtgctccgatgcgagcttgtctaccttcatgagcagggtccactcggatggttcaaagtatgtgggggcagccacttggaaaacaaatctgaccgggatcgcagaattcccgttataagccagattcatcgccagggttccgcctgcggacacaccaaacggagccattcctgcaatatgataccccagttcctccgtcctttgccggatcgcccggactgcattttcaatttctttgttcatctgataaatggatacatcttttccgtgcatctgcaaagtgtaatccacggaagcggtaatatacccctgtgcggcatagtatctgcaccatgtttcaccgtcagcttttgaaccggagttgaagcttcccccgtggatatagagaatcagattctgatcctgcgtcctgtccagtccggcaggaatataaaggtcgtactggtttccgttctcgttttcatagttctggtcgctgaaaaccgcgcaggtcagatcttgtcccagcgactttaccagtcgttccggtgcacttcccagcagaaagatccttgtcaatgcgctggcaagaaacaccagaacaaatattccgttcttcatgatattttttctttctcatataatgttatccaacagcagctttccgcatattgcgcccgaaatgctagcggcaattatcataattgccactacaagaagatcattcttttgcatgatagcctcctaaacggtttctttcatacagagttagtccttcatgtacttgtccagatattccaccacagcatccagatactccatatagaccttgttgtcattttgcagtccgtgaccggaatgctccgctacgaaataccggtgatctacgccgttcttttccagtgcggcgaccagcggcttggatgcggcaaagggctgcatcttgtcgtgtgcgccgtagcagaggacagagggcaccgtatcctttgtgacccagcggtcagcagagatcggcttgaccgcttccagataggcaccggatgtgatatcctccggggtcagtgcctgaccggacattacactgaacagtcctgcggcggcctccgggctttggtcgagaccgaagataccccaatcttccacatgaaagctgccggggccgactgcttcaaataccattctgaccggaagcggcgaggtatcggcatcccgataggcatagagcagtgcaagacatccgcctgcgctgccgccggaaatggccatccggtcgagcttataccccagtttttcggctgctgcaaccacatagggcatggcagctttgatctcctccgactggctgtatacgctggcatccggattttcttccgtaaacaatgtgtagttgatccctgccgccacatagcctttgctgcacagccattccagcatctcggcatctccggctttgtctccgccggtaaacccaccggcgtggagatagacaacaagaccgtatgcgtcctgacttttgtcagccggtacataaagatcgaatttgttggcagcccccgctccataaggcagatctgtgtacaccttgccgaccgtttcatcccaacaggtgttgtatttgccgtgggtcgggtcgctgttcattttgagcaaagcagagccgacaaaagcggcaagaaatgcagcggtatagagcaatccccatttcagcgttttcacagaatattccctccaaacagcgtgccgcccagcagcagattcagtccagcgcgaacagccagccgccctaagaccgcgccgaaaatgataacgatgaacaaaatcaacaatcgctttttcgtcaaatttatcgtgaactcccttcttcttgactttttgatgggacgagtgtatcatcaatacagcgttgagtcaatcgtctcagccaaaatgagacaaagaagggcgtttgtatcatcccatgaagaacatgaacaatcaggaaaagaacacctatgtccggcagcacatcctgtctgcgctactggaactgatgaaaacgcaggagtttgcgtccatcagcattcaggcgttggtggatgccgccggagtcgggcgggcatccttttaccgcaatttcgcaagcaaagaggacgtattacagcaggagtctgtgcgcctgaccaatgaatggaaaacaaaatttgatcaggagcatcctaatggcacaccgggtcaggacaacttatggctcatcagtctgctggatttttataaggagcataccgagttttacttagcactgtatcatgcagggctttccaatgtcatgctggaaacactgctcggctattttgaccgttcaccggagatccccaacgggttggcttatctgaattctgccatcggctatatgctatatggctgggtacatgagtggatgtgccggggaatgcaggagtccggcacggagctggcccggatgttagcagaagcacagaaaaaacaggcataaaagaacagggcgcatcccataaaaagagatacgccctgttttgctattcttaatcttctaacccatggctccctgccacattcttcaaatattcctccgggtcaccgttcagaatcaagtccgcatagcccagagggtcattgtagatgaggtagtccagttctgacctctgcgccatggtcacgtccagtgcatcctcgaccccggtgcagtcgatggaaatctttctcccatcccggagcagcagttccacgcacccggtgtccatgttgaacttacagactctttcatcgtacttcatcatcatatcctccaaatcttgttagtggcttacggtctatgacaaggtatcggggttttacgccgtccacgggagccttcattctcaaacccgaagaaaacgaaaaatccgaacccttctccaatcggaaacaggttcggatttttcttgtttggtggaggcgatgggagtcgaacccatgtccgaaaagagctcagtgtaggtgtctccgggtgcaggcgatctacaacattcccgccgcgccacgccgatcgtcaggctagcgctttggtagcttcatgagttcctgccggtccgcaaagcttaggtccgttcaggtgctgtgtctaaaggacgccccggccccacacgacacaagagtgggcggaacgcgcagcactcaggctgcgagcaactgataattattgttgtcagttaatttttttggaggagttatagagcagttcccccactgctacccgctgcccagaccttgctccccccgtcgaaacctttacgcccccttataaagcacatcttgcgatgtgcggaaagcttggttttctgcggtgagccgcagtctgcaattggaatgcttaataatacttgccgttggacttcacagcccggtcaatggagcgctttgcatcgcgctgggcggcatcggcacgcttgtcgtacagctttttgcccttgcacaagcccacttccatttttacgcggccatgcttgaaataaagcgagagcggcaccagcgtatagccctgcagcttgcactgctggtgcagacgccggatctcacttttgtgtgccagaagccgccggacacgcatggggtcctgattgaacagattgccgtggtcgtaggggctgatgtgcattccctttaccagcagctcgccgttttcaatatccacccagctgtccttcaggttgaccccgccggcccgcaggcttttcacctcggtgcctttgagttccacaccggtctccagcgcttccagaacaaaatactcgtggcgcgcttcgcggttggtggcgatggtcttggtcgccgggcgctcctttgtgggtgccatgctgcgcgcctcctttctccgttcggttcgttgtttcagtataccattttttcagggtaatgcaagggctgtttctgacagaattgtaaatttttacaaactcacagctctccccggccggaaagcgcccggtacagggtggtctcgtcggcgtattccagactggcgcccaccggcagaccggaggcaagccgggtgacccggatgcccagcggcttgatgagctttgccagatacatggcggtggcttcgccctccacggtggggttcattgccatgatgacctccttcaccgtgtcgtccttcagccgcgccagcagctccttgacggtcagctgctctgcgcccacaccggccagcgggtccagcagaccgtgcagcacatggtacagaccgttatactcccgggtgcgctcaaaagcctgcacatcccggggcttttccaccacgcagatcaccgaggtgtcccgcttggcgctggcgcacaccgggcacagctcggcatccgtaaagttctggcagatgcggcaccggtgcagccgggtgtgcgcgccgcggatggcatcggccagcgccgcagcgtccttatccgacatactcagcacctgataggccatgcgggtagcacccttgcggcccacgccctgaaacttgccgaactcttcgatcagcttttccagcggtgcggcagtgtagtccatggtatctccccttcccggctcagagacccggaatgttcaggccgccggtcagcttgcccatctcggcttctgcggtctcgtccacctgcttcacggtggcgttgatggcagcagccaccatgtcttccagcatctcgatgtcgtccgggtccacggcctcgggcttgatggtgatggacagtacctcgtgcttgccgttcatctttacggtcaccatctcaccggcggcgctgccggtgtactcggcggcttccagctcggcctgcttgctcttcatgtcctcctgcatcttctgagcctgacgcatcagggcgttcatatcggggcggccgtagcctgcgggcattcttgctttcataatggtattctcctttattataaacaatttttagcgctttttgcgggcggtatcctcaatgctgacctctaaccccagcttttccagcgccagaagggactgctccgcgttggaggaggtctttcctgccgttttgggctcgtaagggccgatgggcaccggcacgccggatacctcggcgatcagctttttgatcagcttctggctgtccttgttcacccggataaaatcccggaaggtcttgccgccgtcgatcagcacgcgggtgccgtcaaagtaagccttggacttgcgcagatacatatacagcatggggtcgatgccttccagcttctgcacgatctgtccccagtacgggaaggggttcgtgccctgctgcgccacgctgcggggcttggtcagtaccggatcggcggggtgctcctgcaccggggcaggcggttcctctgccgcagaaaccggctgcgcgggctctgcaggggcgggctgctccggctgggcgaccggctccggctcctccggcggcggtgcctgcggggcaggctcgtcccacggcagggcggcatcgctctgctgtaccggcggttcgtccggcatcggcggcagctcctccgcaggggcggacggggcttccggcgcggcaggctgcggagaggtctgctgcacggcaggggcaggttctgctcctgctgccggggtctggggtgcagttgctgcgggggcaggctgcaccggggcgctggcaaagggctgcaccgctgccgcaaaggggcggggcgcttccgtctgtgccgcccgggcgggggcgggctgcaccgttaccgcctgcatctgctggggcggctcggacaggctgaacagtgccagttccaactcgatgcgctggtcgctgccgcgggtcatgtgctccagcgccgtgccaagggtgcggatggcgcggatggcttcccgctgccccatctccgggcctttttgcaggtacagcacttcttcctccggcgaaacaccggacagcagcgcctgcccgccgggcagcgccgccagcatcagggcgcggtagtgggcgatcagttcctcggtcaggcgcttcacatccaccgactgctgccgcagctgcgccagctgtgccagcgcggcggcggcgtcctgtgcttccaaggcgtccgagatgtggaacaggtagctgcggtcggtcacgcccgccatgcggcgcaccacgtccgcatcgatctttgccgtgacaccggcgcaggtgtccagaatggacagtgcatcgcgcagcgcaccatccgccagacgggcgatcagctccgcgccgtcggaggtcagctccagcttttcctccccggcgatatactccacccgccgtgcgatatcctccggcccgatgcgggtaaaatcgtaccgctggcagcgggagaggatggtggcgggcactttctggatctcggtggtcgccagaatgaagatgacgtgtgcggggggctcttccagcgttttcagcagcgcattgaaggccgctgtggacagcatatgcacctcgtcgatgatatacaccttatactggcaggcgctgggggtataggcggtctcgtcccgcaggtcgcggatatcgtccacgccgttgttggaggctgcgtccatctccaccacgtccagcagactgccgttgtcgatgcccttgcagatctcgcactccccgcaggggtcgccatttactggatgcaggcagttgaccgccttggcaaaaattttggcgcaagtggtcttgccggtgccgcgcacgccggtaaacagatacgcatggcctacgcgccctgcggtgatctggtttttcagggcagtcacgatggcacgctgacccaccacatcctcaaaccgctggggtctccatttgcggtaaagtgcacgatacacggcgatgtctcccctttcccggcctttgcggcaaaaataaaaggacagcgctcgacggggttttgtccccgccttgcgtaactcggcatacggatgcaggcttactgaaacgcacgaacgcactgcttaaggctgcttggttccccacctgacctggttcacagcgagcccatcgtacaggacccgcatccgtatgccgaaccacgcagcaggcgctgtccgacacatccttgtggatgctaagatattgtaccataaaccccgccggattgcaagagggggcaaaacaaaaaggagaagcccgaaggcttctcctcgtttgtgctaaaactgtttaagactggcaagcggtgatcaggctcatcttgtagacctcgtctgcgttgcagccgcgggacaggtcgttgatgggtgcgttcagaccctgcaggatggggccgtaggcagcgtagccgcccagacgctgtgcgatcttatagccgatgttgccggcctcgatgcaggggaagatgaaggtgttggcctgaccggcaaccttgctgcccttgcacttgacctgtgccacctcgggagcaacggctgcgtcaaactgcagctcgccgtccacagccagctcggggtccatctcctgagccttgatggtagcgtcgtggctcagtgccacggtgccgcccttgccggagcccttggtggagaagctcagcacagccaccttcgggtcgatgccgaacagctttgcggtgcgggcagtctccacagccacctctgccagcttggaagcggcagacaccttgacctcgccggtagccttatcgacggtatcggtgtaatcaatgttgacagcgcagtcgcccatggcaatgcgcttcagaccctcttcgccgcagtcgcggtccagaataaagcaggagctcaccagatgtgcgcccttcttggtcttgaccagctgcagagcgggacggatggtgtcggcggtggagtaggtagcgccgcccagcaggcagtcagccttgcccatcttcaccagcatggtgccgaagtagttggacttcttcagcagtgcggtgcactcctcagcggactgcttgcccttgcgcagctccaccatggtgctgaccatctcatcaaaaccggcgtagttctccgggtcgatgatctcggcagcggaaatatcaaagttaccggcggcggcagcagccttgcactctgcctcgttgcccaccataacgaccttcagcacgccctcggccagcagcttgcttgcggcctccagaatgcgggggtcattgccctcggtgaacacgatcgtcttgggatttgccttcagctgtgctaccagcggtgcaaacatatcagccattgtgattacctccgaaaatgctttccaaaatttgcttcctctgtctgttggacacaaggatgcctttcttctttattctagcacagacggcaaaaagttcaagacaaaattgtgtttttgtgctatattttaggggagaaagccttgttttatttgtgaataaaatatcatactggttttaaaggatattttccccgcaaatataaaagagcccgtgcagtccacaggctctatgggcagatgctccatcatgcagttttctttacggggacgctgttctcatacagttcgtggggcgcaacgtcctgtccctccggccattcgatgcccacgccgccgggcagcagctgcaccgcgttgaaatagctttcgtccttcagctgtccgtaccacggccccgttgcatagggtgcaacgtcaaagagctttacctctcccgtttcgtagaacaggcgaagcttcaaggggcttatggtctccaccttggtcaattttggctgtaacataaaatcactccttatttcaaagggtcaatgcggaagaactgctcgccgttgctcaacagcttccagttcgcttccagatcatcgcggtgtattactacccacgcttccagcagcttcagcttgtttttgggaaagccgccttccaaaatcgtcccgtccagtgccatcacgatctcttccccggaatactccgcatggatatgcggcatattgtgttttccgccctgttcccggtacattctgacgatgatgccataaaatatgcttaataccggcattttacccactcccttcttcaagttcattttatcatacgcaggtgtttttttcaagaaactgtgatgatctctttttgtgcgtttgccgtactcttgaatctgtgttatagtttacaatgttgtaatttgcaaataaaccgccaatctgattttaaaggagatgttctccatggatatggatactttaaaggctgaatgccttgcctgcacccggtgcgagctgtgcgccacccggacgaacgtagtgttcgggcagggcgtgccggacgccgaggtgctgttcgtgggcgagggccccggccagagcgaggacgagcagggtctgccctttgtggggcgcagcggccagctgctggacaaatacctgtttgccatcgaccttgaccgcaaaaagaactgctatatcgccaacatcgtcaagtgccgcccgccccagaaccgcgacccgctgcccgccgagagcgaagcctgtatgccgtggctgcgggagcagttccggctgatccagcctaagatcgtggtctgccttgggcgcgttgccgcccagcggatgatccggcaggatttttccgtcacccgggagcacgggcagatcatcaataaaggcggcattttgttcatgggcaccttccaccccgccgccctgctgcgccagccccagaacaaacccgaagcctttgcggactttaccgtgctgcgggacaccattgccgccgtgtgcgagcatacctatcataaataaggtcaggaaccaaccgcgccgcttttgcatactgtaaagcaaaagcgaggtgtttttgtatggaaagttccgtgcatccttctgtggatttctttctgggcgctacaacgcccgccgggttcaagggctactttgcgccgctgcgccgggagcccgggatgcagctggtgctgctcaaaagcggcccgggctgcggcaagtctactttgatgaagcgtctggcgcgcgccgcacaggagaaaggcgagcccatccagcgcatccactgcgccagcgaccccgacagtctggacggggtggtgttcctgcggcagaaacgcgccatcatcgacgccaccgcgccccatgtggtggagccggaagcccccggcgcagacgagcgtgtgctgagtttgtaccacaccatcgatgccgatgccctgcactcccacaaggacgaggtgaccgccctgtttgcccgaaaccagctgctgcgcagccgggcggcgcggtatgtggcctcggcgggcagcctgctgctggacagccgccgcgccgaagcgtgcagcgcaaactttgagaaggtgcgccgctacgtcaagcggctgtgcacccgcctgttgccccgcaccgaggagatgggctctgaagagctgcggctgctctctgccatcacgcccaagggcgaggtgttctatcagggcacggtgcaggcgctggccgaccggtgtatccttttccgggacgactacggggcagtgtcccgtctgctgctggagctcatccgtgccgagacgctggcgcggggctaccacatcatcacctgcccctgcgccatgcacccggaggacaagatcgaccacattatcatcccctccctgcggctggcatttttgaccgacaaccgctggcatccggtgcggctatctgccgcgcagaccgtgcggtgcagccgttttgtggacagggagaacctttccgcctgccgggcacggctgcgtttcaacgagcgcgccgccgccgaattgctggaacaggcctgtgccctgatggcgcaggcaaaaagctgccacgatgaactggagacctactaccgcactgccgtggactttgcacaggtggatgccgcagccgctcagtgcatggaactgttcggggtaggataacgtaaaaaccaacggaggtgaaacgccttggcaagcatccatctgcccatccggcagctggtggagtttttgctgcgcaccggcagcatcgacagccgctttaccggctttgaccgcgccaacgagggtgcacgcatccaccgcaggctgcaaaaagccgccggggagggttatcaggctgaggtgttcctcagcgcggagcgggaagcctgcggcatcgcctttacgctggaaggccgggcagacggcattttcaccgatgaaaccggcactgtgaccattgacgagatcaagaccactactgttccctacgaggagatcaccgaggagctgaacccctgccactgggcgcagggcatggtgtatgccgccatttacagcagccagcaggggctggaaacgctggcggtgcggctgacctattaccaagttgataccgaccaaattcagcgctttacgcggcagttcacccggcagcagctggagcagtttttgcagcagcttttaacgcagtacgccccgtgggcgcaacggcagctggactgggacacccggcgcagccagagccttgcggcgttgcaattcccctttgcggaatatcgccccgggcagcgggcactggcgggcgaggtgtaccgcgcctgccgtgccggaaaaagcgccgaccgcaagggcggtacccgcgttttttgtcaggcacctaccggcatcggcaagaccatgagcgccctcttccctgccctgaaagccatgggtgagggctgcggcgcaaagctgttctacctgaccgcccgcaacaccacccaagccgccgccgaggacgccatcgcgcggctgcgtgccgcccagcccggccttgccctgcgcagcgtgaccctgaccgccaaggaaaaggcctgtctgcacccggacgccgaagggcaccccgcctgcctgccggaggtgtgtccctttgccaacggctactacgaccgccgcaaggatgcgctggcggctctgctggacggcagcggcagtttcagccgcgccgcactggcggacaccgcccggcagttctcggtgtgcccctttgagctggggctggatctgagcgagtggtgcgatgtggtcatcggggactacaattatctgtttgaccctgtggtgcacctcaagcgcttttttgatgccgccggggactggctgttcctcattgacgaagcgcacaacctgccggacagagcccgcgccatgtactcggcgcagtttgccaaaagcagcctgagcgaagcaaagcgggcgctgggcaagggcaaaagcagcctgaaaaccgcgctgaccaaggcggataaggtctttctggcggcacgcaaagcctgcgcacaggctgcgccccgcacaggtgcagagcccgccggggagaccgagcctacgcaggtgagccttttgcccgccgaagctgccccggattttgccctgccgcagccgctgtacgcccgggacggcaccgtgtttttgcagcagctgcccgccgctttgcccgctgcgctgcgggcggtgcacacccctttgcaggactggctggaacagaaccccgaggaccccgcccacgcgcagctgctggagctttactttgccctgcaggatatcgcccgcgcagctgaccggtacgacagccactttgtcacccagctcaccgcccggggcagcgagctggagctgcatctgctctgcttagaccccgcgccctttgtggatgccagtctggcggcagggcgcagcgcggcgctgttcagtgccaccttgaccccgcccgccttttaccgcaatgtgctgggctgtgccgatgcccgggcagtggcgctgccaagccccttcccgccggaaaatctggggctgttctgcctgccgggcatctccacccgctaccgccagcgggaagccagcgtgcccgccgtagccgatgcgctggcggcgctggcaaagggcaaaaccggcaactatctggcgtttttccccagctacgcctatttgcagcaggtgtacgaagcctttgccgcccgctggccggacatttccacccttgtgcagcagcgcagtttggacgatgccgggcgcgcggagtttctggcgcagttcgtgccccgccctgcccagacgctgctgggctttgccgtgatgggcggcatcttcggcgaaggggtagaccttgtgggcgaccggctcatcgggtgcgccatcgtaggggtgggtctgccgcaggtgaacccccggcaggagatgctgcgccgctattacgaggagcagtccggctgcggcttcgactacgcctaccgctacccgggcatgaacaaggtgctgcaagccgccgggcgggtggtgcgcaccccgcaggacaagggcgtggtgctgcttttggacgaccgctttgcgcagcccgacaccgcccgcctgttcccgccgcactggcggcacatccaatatctgcccggcaccgccgcgctggaaacggcgctggcagggttctggggttagcatcctcgccctctcagtcaaagcctgtcggctttgccagctctcccaaagggagagcctttggtagtccacgcagacttcatctttttgccaaggcctctccctttgggagaggtggcagtgagcggagcgaactgacggagagggcgagcccgctaaccgaagggcatacctgctaaagaaaaagcatctgcaaccaaatcgccagctttctgaagctcagaagcgatcgttgcagatgcttttttgtctgatactttaaggattatgcccttaatactccacgcccttccgtgcggcgatgcccttctggtaggggtggcggcggcagcacatctcggtaaggtaatctgcggcgtccagcatccatgcgggggctgcgtgggcggtcaggacgcactcctgcccggcggggcggtgcagcaccgcctgctgcagcaggtctttgtccaccatgtccagttcccacgcactgccggcttcgtccagcaccagcagatcacagggctgcgccagcgccgccgcaaggttttggttctgcaaggtgcgggtagcggccttttcggcttcgttcatctgaaagacgaatttctgcccggccttaccccggtagacggtggcgcccagctgttccagcagcgggatctccccgctctgcccgccctttaaaaactgcacgatgaccacacgctttccgctgcccagtgcccgcagggcaagccccatggcggctgtggtcttgcccttgccgtcgccgtaatacagatgcaaaaggcctaagctttccatcgttcttctccttttttgtaacaaaaggcacccgcagcagaacggctgcggatgccttgttatttacacgttgcttttactggtacagcgggaactcccgggtcaggcgcagaacgcgctcgctgatctcgtccttcttttccgcatagtgccagatgcagtctgcaatgcagtccgcgatcacctgcatctcggctgcgcccatgccgcgggtggtgacagccggggtgcccagacgcacgccggaggtcacaaaggggctgcgggtctcaccggggacggtgttcttgttggcggtgatgtgcacgctgtccaggcgctgctccagatccttgccggtgcactcctcgtcccgcaggtcgatgagcatcaggtggttgtcggtgccgccggatacgagctttaccccgcgctgctgcaaagccgcagccagtgcctgcgcattttccacgatcttgcgggcatattccttaaactccggcttcagtgcctcgccaaagcagacagcttttgctgcaatcacgtgctccagcgggccgccctgcgtgccggggaacactgccgagttgatgcgcttggcaatgatggggttgttggtcaggatcaagccgccgcggggtccgcgcagggtcttgtgggtggtggtggtcaccacatcggcgtagggcacggggctctggtgctgaccgcccgccaccagaccggcaatgtgcgccatatccaccatcaggtatgcgccgtagccgtgggcgatctcggcaagcttttcaaagtcgatggcgcgggggtaggcagaagcgcccgccaccagcatcttggggcgcaccttgcgcacctgcttttccagctcggcgtagtcgatcacgccgtctgcgccaacgccgtaggagatgaagtggtagtttttaccggacatattcaccggggaaccatgggtcaggtgaccgccctgcgaaaggtccatgcccatgacggtatcgcccagctccagcagggcaaaatacacggcaaggttggcctgtgcgccggaatggggctggacgttggcgtactttgccccgaacaactggcaggcgcgctggatagcaatgttctccacctcgtccacatagacacagccgccgtagtagcgcttgccgggcagaccctcggcgtacttattggtcagcacgctgcccatcgctgccatcacggcgggcgagacgatgttctcgctggcgatcagctcaatgttctcgcgctgacgggtcagctcccgctccatggctgcgcccagttccgggtcggctgcattgaccatgccgatggtgtccatcatatccttgtacattttacttgcccctctccacaaaatgttgtagatcctctcagcgcagcgcccgtgcggcgtttgctgctgtaacataatcatagcagaaagcggcggcggcttcaatcctcttttcgccaaaaggcttgctttttttgtctgaagtgtttattatgtttgtataaaaatgcgctgtcgattttgtatatttttcaagtatccttcctcacaggtgaagcgaggtgttttgtatgaccattgccgaggaaaaacaggcgcagcgtgccgcaggccgtgccgcccgcaaagcgctggatgcgccgcagcgcgccgccgccaacgcggcgctgtgccgccgggtgctggaactggacgcctaccgcgccgcccatacccttttgctctacgcagcctttgggggcgaagccgaccttgccgccgtggctgccgaagctgtccggcagggcaagacggtagcctacccggtgtgcggcgaaggcttttcccttatcgcagccgtgccgggcgcggacggctgggcggtggggcagtacggcatccgcacgccggtgccggagcgctccgcgcttttgcagccggagcagctggatctggtgctggtgccctgcaccgcctttgacgcagactgccgccgggtgggcatgggcaagggctactacgaccgctacctgccccgctgcacccgggcggtgaagatcggcattgcattggaggttcagcgcgtcccccgcgccgccgtggacgcccacgaccagcggctggacgcctttgtaacagagaggggtatctacacatggaaatgaaggatctaagctgcgcgcagtttctggcacagcttgccagcaaagcgcccacgccgggcggcggcggcaccgccgcgctggcaggcgctgccggtgtggcgctgggcaacatggtgggctgcctgaccaccggcaaaaagaagtacgccgccgtggaagcggacattcaggcactgaacgcccgggccagtgccctgcggctggaactggaagcgctggtacaggccgatgccgatgcctttgcgccgttggctgcggcctacggtctgcccaaggacaccccggagcagaccgcgcacaaggctgctgtgctggaagccgcgctggacggtgcaagcgccgtgccgctgcaaatcatggaaaagtgcgccgagggcatcgcgctggcgggacagtacgccgcgaagggcagcgtgctggcggtatcggacgcggggtgtgccgccgtgctgtgcaaggccgctttgcaggctgcaagtctgaatgtgttcatcaataccaagctgatggcagaccgcacccatgccgccgcgttggacgcccgggcagacgcattgctggcagagtttgtgccccgggcagacgaaatattcaccgccgtcagcgggaaactccgcaataaataacatcataaatgagggaaagtatatggcaacgattttaaagggcgcgccggtggtggccgccatgaacgagcgcagcgccgcactctgcgagcagctgaaagccaagggcatcacccccacgctggcggtggtgcgtgtgggcgagcgggaggatgacctctcctacgagcggggcgtgatgaaccgctgcggcaaggtgggcgtcgccgtccggcagttcgtgctgcccgccgacgccacacaggagcagctgctccaggtgctggacgaggtgaacaccgatgacggcatccacggctgtcttttgttccgtcccctgcccaagcagttcgatgaccgcaccgtccgcgccgccctgcgcccggaaaaggacattgacggcatcacggacggttcgctggccggggtgttcaccaacaccgatctgggctatgctccctgcaccgcacaggcgtgcatggaaattttgaagtattacaacgtccccctttccggcaagcgtgccgtggtggtggggcgcagccttgtggtgggcaagcccgccgccatgatgctggaccgggaaaacgccaccgtcaccctgtgcaactcccgcacccggaacctgccggaggtgtgccggcaggcggacattgtggtggtggccatgggtaaaatgggcgctgtgggcgcggactgcctgcgggaaggccagaccgtcgtggacgtgggcatccatgtgaacgaggaaggcaagctctgcggtgacgtgcagttttccgccgcagagccggtggtggacgccatcacccccgtgcccggcggcgtgggcaccgtgaccacctcggtgctggtaggccatgtggtgcaggcagcgtgcaaaaaggcaggggtgtaaactcccccagtctcgctacgctcgacagccccctctgggatggggctcctgacgtgaccacaaactttacactttagccggaaacatcatcgctatgccaagggctccatctccgagggagctgtcacggcgtaagccgtgactgagggagtttttaaggagcggtttcttccccaaggggacggcttttcgcagcagaaactcccccagtctcgctgcgctcgacagccccctctgggatggggctcctgacgtaaccgcaaactttacactttagccggaaacatcatcgctatgccaagggctccatctccgagggagctgtcacggcgcaagccgtgactgagggagtttttaaggagtttatctatgtctttgccatatcagggaaaaatcattccacgcgcaaaagaactgcgcaaaagagccacaaagcaagagcaacatctttggtttggttttttgcgtaattatcctattcggtttcagcggcaaaaaacgatcgactattttatcgccgacttctactgccatgccgccagattggtggtcgagctggacggctctcagcactacgatgaacaggggcttatctacgataaagagcgtgcggctattctggagcagtatggtgtaaaggttttgcgcttttcaaacttggatgtcgagcgcaattttcagggcgtttgcacggcgatcgatctagccgtcaaagaacggatagatcagctttctacggatgaataacaaaacaacaccctcaggcgcaaaggtctgagggtgttgttctttggttttatagcgtgctgtttacccccgcacaaggagcagcagcagagccgaagccacgcactgcagaatcagccagcgggctaccacctgctcgtcgctccagcccttgcgcttgcgcacatggtcgtggagaggggtcagggtgtttttcaggatccagatgtgcagaaaacgcttcaggctgatcttcagaatgcccaagctgccgtccgcgatgaacacgatagccgccagcaggaaggcgaacggatggccgcacttgagggacagcatggcgatgaaaaagcccatggcgcggctgccggcgtcgcccatcagcaggctggagggcttggcgttgagccacaggtaggccagcagcgcaccgatgaacaccacaccggcggtggcgtaggtgcccagctcggtcttataggccagcaggtaggtgccgatggtcaccaccgccagactggcggaaaggccgtccacaccgtcggtacagttgaccacgttgatgcttgcccagatcaggatgacgatgagcagcaggtacaccgcatagggcagggtgaagctccactgcaaaaagtgcaccccgcagccgttgaagttcaggtaggtcacgcccgccagcaccgcaatgacaaaatcaatgatgccctttttgtactcgttccatgcggtctcggcggcatcgtccagatagccagagagcatggaagcgatcagcagcacattgtacaccacatactcggtgttgaagggcaggaacgccagcgacaccagtgcgatgcacagtacaaagatcagtccggagccgcgcgccttgcccttggaaagttcgccgttcaccgcaaaggcgcggccgtggtcgtggggcagtttatcgcggaaaatggaatccgtcagggcggtcagggcgaacgccagcaaaaatgccatggcatccacgccccgctgcccgatgacagaggtaagcatttggatcataagataacattcctctttctttctgtatagtcctttgtgagtgtatcacgcccttgcccaaaaatcaatcccggcggcaaaattcgctgcggattgacttttctcccgccgctctttataatagtatgttagtctgtattttcacccacaacgcaggaggtttcatgtccattacacttgagcagctctctgcccggatgcggcagggcgagcaggtgccgctgcgccacactgcacaggtggcgctgacgctgagcatcccttccattttgcagcagatcgtagttaccgccatggagtacatcgacgccgccatggtggggcatatcggcgccgccgccaccgcttccatcggcatcgtcagctccagcacatggctgctgcacgggatgctggcggggctgtgcatggcgttttccattcaggtggcgcagtatctgggcgcagaccgccagcaggacgcccggggcgtgctgcggcagtccatgctgttcaatctggtggtggggcttgccgctgccgccttcggcgtgggcatcagccggtttctgcccgggtggctgggcgcagacgcggcactgcaggcaaatgcttcggcgtattttgccatctggtcggcttccctgccctttgtcatggctatgggcacctatgccgccatgctgcgctccaccggcgatgccctgacccccggcctgatcagcgtgttcacctgcgtgctggacatcatcttcaactttttcctcatcaaccccacccgggagatgacggtattcggccagaacctcacggtctggggtctgggctggggcgtaccgggcgcggcgctgggtacagccctcgccaacgctgtgggtggcacgctggcgctgggcgttctgctgctgcgggacggcccgctgtgcatccgcaagcccggctcttggcacattacccgcgcctgcctgcataacgtgtggaaggtgggtgcaccgctggcggcagagcgcgctgccctgtcctcggcacaggtgctgctggtgcgcatcgtgtccgggctgggcacgaccgccattgccgccaacagtctgggcgtcagcgccgagagcctgtgctacatggcgggctacggcattcaggacgccgcccttgcgctggtgggacaggccgtgggcgcaaaccgccgggacatggcaaagcgctttgcatggctgtgcaccgccatgggcatgggcatcatggcgcttaccggcgtggggctgtatgtgtttgccccgcagctgatgggcatcttcaccgccgatgccgccgttattgcgctgggcgcgcgggtgctgcgcatcgaagcctttgccgagcccatgttcggggcaagcatcgtggccagcggctccatgcaaggcgcgggcgacagcaccggctgctttgtgctgaaccttatcagtatgtggggcgtgcggctgaccttggctgttctgctggctccccgctttgggctggtgggcgtatgggcagccatgtgcgccgaactttgcacccgcggcgtactgtttttgctgcgcatggcgcgtggcagatggctggataagggcgcgctggcgtaaaaagcaccttgtcagcgtcctcgccctctccgtctgctcactgcgttcgcatccacctctcccaaagggagaggccttggcaaagagatgaactttgcgtggactgccaaaggctctccctttgggagagctgtcaccgcaggtgactgagagggcgagccctctaaagaaagagagctagaatgtccgcaaacacctgacgcatccgcaaactttacactttagccggaaacatcatcgctatgccaggagccccatctcagagggggctgtcgagcgcagcgagactgggggagtttcttcggcagcaaactccctccaaacagagaaagagccggaaagtccgcggactttccggctctcttgtttcagcagcttacttgcggccgtgcaggatgggagacaggggcttatagatcagcaggcacagcacggcgtccagcagacccttgaccagcgtgaagggcatattaaagatcacaaggcacttgatcaggctgtcggcagagggcaggatagcctgatacatccccagaatggcttccagcggcatatggtagaactgcacataggccgggtaggtgatgaagtagttggagggcacgctgaacaccgccatagcggctgcaccggcgatagcgcccagaatggcggtcttgcggctcttatggcgcttgtagacaaagcccgccacagcggagaacaccgcgcccagcataaagttgcacagctcgcccacgcaggcggtggaggtgcccttgatgatgatgtgcagcaggttcttcataaagctgatgaccacgccgtacaccgggcccagtgcaaaggcacccagcagggcgggcaggtcggagaagtccatcttgacgaaggacgggatgagcatcggcagcgggaactcaatgaacatcaggataaaggcgaccgcgctgagcatggcggcaacggtcaggttgtgggtggtattctttttcatggtagttgtcctccccgggggtgtacgccccgttcaaatttgttcggaaagcccttttcgcgctggatcgaaccggaaagacaaaccaaaaaacgccctgctgcaaccaaaaaactgcaacagggcgcacagacgcaatttgcctgccgtttcttgcatccggactataccgttggtcccggagttgcaccgggtcagcacccttgcgggtggtcgcggactttaccgccagtggggaattgcaccccgccctgaaacgaactttctgaccaagagtatagcgcggtactgcggcgctgtcaagccccctttttgaaaagtttgcgcattttttatcaaagtgtgttttcactgttctttccttgccccgggcggcagagtatgctatcataatatgcgttgtgaaaaaacacaggaggttttccatgattttctcgatccgtaaccttggttttgagcttggttcgctgctgctggaaggctgggcagcctttgccgcccgggtggtgtgcgcggcgctgctgctggtgcttggctggctggcgcggcagcttttgtcccgccgggtgtgccctgccctgctgcgccgcagctggcggctggcgggtacgcccattctgctgcgcagctttgccgtgccgctgcagcggctcacccttgcggcgttcatctatgccgcagctgccagcctgccgtgggcaatcagcggcgtgagcaaatttctgctcacagtctttgagctggccgccaccttttttgtgtgtcagggactgtacgccgccgccgaccttaccgaccttttgctggcaaactgcggcgaggaggtgcgcgccaaccgcaccctgaccaccctgctgaacaagctgtacaaagttttcatcgtggtattgggcgttatgaccatggcacaggagaccggcctgccggtgggcagcatcgtagccagtgcgggtcttgtcggtctgaccatctctctggcggcgcaggacagcgccaaaaatctgttcagcgggctggtcatcctgctggaccgcccgttctccatcggcgactggatcaccgtgggcgatgtttccggcgaggtggtggacatcaacttccgctccacaaaggtccgcgcactggataactcggtgtacatcctgaccaacagcacggtcagctctgccaccgtcaacaacggcaccttgcgcaacaagcggctgtaccgtttcaccctcggggttacctacgataccacccgtcctcagctggagcagctgatggcagacctgaccgccatgctcaaggtcagcccctacacctacgaggactcggtgctggtcaagctgagcggcttcggcgcttccagcatcgacctgctggtgtccgcctacctgcgcaccgccgacatgacccgctttttgcagatgcagaacgatttgaaccttgacctgatggacgtgatgcagaaaaacggcgtggacttcgccttcccctccaccacggtatatctggaaaaggacagcgaaaacgaataaccgaaagggactgctgcgcaaaggatgtgcagcagttcttttttgaaaagcgccggttttattgtaaaaagcaggcgcttttgccctatgatttcccgtccggtcatgttattcttatagcgcacccgcatacactgcggagcacgccatcaaatcatctgcggaggaatgcttcctatgacacagcttttgctgcccattatttacttagcctttatcagccttggcctgccggattccctgctggggtctgcatggcccaccatgtacccccagctgggcgtccccttctcctacgcgggcatcctgtccatgatcatctcgctgggcaccatcgtttccagcctgaacagtgaccggctcacccgggcgctgggcacgggcagagtgaccgccctcagtgtgggcatgaccgctgcggcgctgttcggtttctcggtctccggtcggttctggatgctctgtctgtgggctgtcccctacggtctgggtgcgggcagcgtggatgcagccctgaacaactacgttgccctgcattacgagagccgccacatgagctggctgcactgtatgtggggcgtgggcaccaccatcggccctgtggtgatgggcgcggcgctttccggcgggctgagctggaacagcggttaccggtacatcgccctgttccagatcgcactttctgccgtacttttttgcagcctgcccctgtggcataaacgccccgatgccgccccggacggcaccgcgcccaaggcactgaccctgccgcaggtattcgcgctgccgggcgcgaaggaagtgatgctctgcttcttctgctactgtgcactggagaccaccgccgggctctgggcaagcagctacctgacccttgtgcggcaggtgcccgcccagacagctgccagctttgccagcctgttctatatcggcatcacagtggggcggggcgtctgcggctttttgaccttaaagctgagcgatgaccagatgatccgtctggggtttgcggtgctgggcgtgggcattgccgccctgctgctgcccggggcgcaggtttttgcgctggcagggcttgtactggtagggctgggctgtgcgcccatctaccccagcgtcatccacgccaccccggcgcatttcggcgcacagaattctcaggccgtcatcggcatccagatgagcagcgcctatgtgggcaatcttgccatgccgccgctattcggtctgctggccaacaacatcaccccggcactgttccccttctatctgctggtcgttctgatgctgatggcgctgatgcaccggcagctggtgcgcaaaacggcgcgcacctgaaagggtccagcctgctaaagttaaagggactgccgtacctcatttggtgcggcagtccctttgctatttattcagttatttgtaaaaaactgcgttcagaacttattgagcatctttttcagctttgccagttcctctgcatcgcgggtatcatccagcagggtgagagcatcgttgaaatagttgcggtccagataagagtgggtggcattggcgtgggcagccatagcctccagcacggcataaccggagcgcaccagcgggtgggtggcaggcacgctgccgccctcggccaccagcgcaaacttgctttccgccatatcctccagcagggcgctgtaagcgttgttggggtcggtgccgtggttctgcagaccctgatacagcagctgtgccacaaaacccagcgtagaagccgtataccagttaccattgaacttattggggttcgcggccttatcggtgaccggggagttgatcttgttggtcaggtacaccaccaccagattctccacggggtcgatcatggtcaacgtaccggtccagccctgatggccaatggtattggagggtgcctgcgtaccgaaataccagcagcgctggttgtcaccctcacgccaccagcccagaccccagttggcagcgtcctccttcttgggtgcggtaaaggcgtccatcacgttgcgggagaagtagcggttctcgccgtagccgccggtgagcatgacagaggccagttttgccaactcggtagcgttggaaaacaggcctgcatggccggaaataccgcccatcgcgtagtagcacttctcgtcgtgcacctggccctgaatggtagcggtgcgcacgccggtgaaggagatggcaccatcacgggtgttgccgttcagctcggtagcggcgcagtcgttggcggcaaagccgttcagcagggggttgtaggtggtatgggtcagacccataggatcccagaaggtctccttcaggaaggcgtccagccccttgccggtgatggcttcaatggcgaaggccagcagcatatagtccacgtcggagtaaacggtcttggtgcccggcttgtacatcagcggggtcttgaagatggacttgagggtcgcggcgcgggttgcagcgctgccgtcccaaccggagaagagcaggttggtggcaccgggaacggtcttttgagagcactggtcaaaggaatcgttgtggtactgggggtctgcagggaagcctgcctgatggcgcaggatatcgcgcagggtcagttctgccttccactgcttgttgaccttcaggcccgggttctcgtagccgttgtaggtaatgtcgatggtgtcctccacaaaggcgctgcccagcaggtctaccagacggctgtccaaattggccttgccctgcgtgacgaggtactgtaatgcgtagtttgcagtgtacatcttggtgttggaggccagatcgtacagggtatcgttggtcacagccgggctgtcggtcttgggggtgccgtccggattataggagttcaccttgccccatgcgttctgatacaccagcttgccgtttttcacaacagccatctgtgcgctggggaagccgttgttcacatctgcctgaatgatctgctccagcagttccagtgcatcgcggtcgatgcccacgtcctgcaggctgccctcctgcacagtggggtagcccacccgcacggtcacctttttgccgcggggacggatgccgcccacctgaatggtgttgcggccgttgatggtctggccggaaatatccacgttccacacgccgcctgccgccatggcagcggtgttgatctggcggttattgacgaacaggttaaaaccggtcacgcctgcctcgggctccacgcacagcgttccctgccctgcgtagcccacaaaggtgtacatgtggttcatggccagcgtatcgtccagacccttccagttggggaacaccggctcgccctgccagccgccgctcacgctgccgcggctggtcaccttgaccgaggccgcctttttagggatgaggttcagggagttggtatcctccgctgcggcggctgcgggctcggcagcagaggctgccccggcggtgcacacgttgagcgccatcatgcccagacctgcaacgctgcccttcaggaacgttttacgggaaaatttggttgacatggtaaggtcctcccattctttttgccgcaatgcgacaatatgcctgtattcgtgcttttttgtcccgcagcagcgggactgccttatgccccgaattgtacgcgagacgaaacaaaatgtcaatcatgttttcatcttgtggcacaaagttttgtgtttctcagtttttcgcctattttggcacattgttttgcattttgtttcaaattttcatgcgttttgtatacaaccagccgcaaaaatgcgtaaaaaaaagccgccgcacaaaaccttgtgcagcggctttggttcataatttttcttacaaaatgcgggcgctgatggcgtttgccacttgaaacagatctttctgcccgataaagccaaacttggcctcgtgaccgtccgcaaagcagaccgtcagctgggacgcctgcagcgggtcgccaaagcccgccgtctggatgccgtagtgcagcaccttgcggtagggcagcacaaaaagctgctgccgcgtgcccgtaaccccctgcatatccaccatgatgatgcggtggctggtgaacaccacctgatcgcgcaccgtcttgtaagcgcccacgatctgctcgccctccagcagcagggcgttgatatttttgcagatatccttctcctgcaggcgaataaggttctccatcggtttatcgcggaattccatagcggcgttcccccttcagcgttttgatggctctattgtagcatttccgccgccggttggcaagatggctgcccagataaaaagaaaagacccgaaccattcaaggttcaggtcttgtggagcgggtaatgggaatcgaacccacctcctcagcttggaaggctgatatactagccgatgtactatacccgcaattgcagaatacattataccataattttgcgcaaatgtccagcatgaatttagggtctgcaaccgtgaaagtggtggaagcggagaatgaatcaaccgttgtccgtattgacttcgttgcacaatatgggtataatataattagaattttactattatggataggttacacaggagcaggaggtgcttttatgaatatccgtccatctgcagcgattcgccagaactacaacgagattgctgatttgtgcagagaaaccgccgagccgatttttctcaccaagaacggcgagggtgatttagtcgtcatggacatcgatacctacaaccgccgtgaaaaaatgctgaagctccgtgaagagctgctttccgtggaagaggatcggatgcgtggaagcgagggctattcgatcgacgaggtcacttccatgatgcgttgcgcgatcaaggaggccgccggacatggagcagcaaaataaataccgcgtgatcgtatcggcacgggctgctcagatgctggtgtcccatgccgcatttctggcacaggccagtcctgcagcagcagagcggcttacagtcgaatttgaaaaggctgcaaagtctttggagcagatgccgcagcgctgcccatggctcaaaggcgaatacattcccaaaaatgcttaccgatttatcctgtttgaaaaccgctatatgctcatcttccagatcgtagatcatacggtttatgcagattatgtggtagattgcagacaggattacggctggcttatccgatgatcaacaaaggcggtggctttccttttgtgggaagctcccgccttttgctgtgtctgtgtaaaagtcaggaattgcgtgtttctactttagatttatttctcattgcggggctttttaattttgcaattcacaatccgacttgcaagataaattatccaaaaagtaaggatataattgttcgttataaactttgtaaaggtcgcttgttcccctaatcttatttcaacaaagtaaaatatcaaatactgcacaattagcataccaccaacatctactaccagttttttcactatcttcggctcctctctataaacccttttatccagataacgcagcaaatcactggtttgttgcaagattttctgtttttatggttataatcatgcagccgctccctcatttttcagtagattcttccagattctttcggtactgtgccggactgacaccatactctttcttgaatacccggctaaaatagagtgggttatcataccctacgatctctgcaatttctccaatattgtattcggtgttctccaataagctctgtgcatttaccatccgaagggacaggatgtattgtgcagggcttattttcatgtactgcttaaaattacggataaaccagttcgtactgatatgcagcgattctgcgtaatcgtccacactgacctttgtgttatagttctcgttaaagtaggcaacggcggcttcgatctcttccgggatgctcgtagttgttttctcgctttcctgctgttgtcggcttactaaaagcagaatgatgtcgaataaagaagcaatatagtcttcatagccatattcacattgctgcagttcccggatgatctttcggaacagcatcttgtagtccggcagtgtgccgctgtaaagaacgtgcttgtccaaggggatcccgtgatagttcaggatgtttttgacatcgtatcctgtaaagtgaatccagaacacctccgggtgatcttccacataataaacatacttctggacttctttcggctgataaagcaccatgtgtccagaagtcaccacttcctcaacaccatcgaaccagaagtgcgctttaccggatgccacatagaggatttgatagtctctgcggccctttgcccaaaaagtaggcagctgagggcgttttttcaagcgataagtgccgcagctgcctacgaccagcggctttgagtagtctttgaaatccaaacgggagttgttcaaatatcctgagttgaaatacatccctgcgtcctcctcatcttcagagattttacagtgatttgggaaatgttctatcaaaaaattacaaactctttgattttgtgcatattttgttccatcttgtctatatcttttcgtcccattagattctataatattttcagacgaaacgcaagagatttgggcaacttgcggaatgacaattccagtctgaagtgcgcagcagattggtcgcgcccacacaaaacaagcaagatgggagaaagcacaatgactgagaagcgttatctaaagtggtataataaagtcggctatggttcaggcgatattgcgggcaacgtggtgtatgcgttcctgtcctccttcgtcatgatctatctgaccaacaccgttggcctgaaccccggtattgtcggcactctgattgcattttccaaactgctggacggtgtgacggacattttcttcggctctctgattgacaaaacgcactccaaaatgggcaaagcccgtccttggatgctgtacggctacattggctgcgccatcacgctggtggcaatcttcgccatcccgaccaatctgggacagtttgcacagtacgcatggttcctgatcgcgtatactctgctgaacgctgtattctacactgccaacaacattgcttactctgcactgactgctcttgtcacgaagaacagtgccgaacaggtcgagatgggctcttggcgtttcatgttcgcatttgcaaccagtttgctcatccagtccattacgctgggtgctgtcacggcactgggcggtggtgctgctagttggcgcactgttgcaatcatttacgccatcatcggtctgcttgtcaacaccctctccgttttctccgtgaaggaactgccggaaggcgaactggtggataccaccgacaaaaaggaaatcgagcaggacgaaaagtacaatctagttcaggctgcaaagctgctggttggtaacaaatactatatgatgatttgcatcacctacattttgcagcagatctacggtgccatgatcagcatgggcacctactatgcaacctatattctcggcaaccagaatctgtttggcgtgttctcttgggcagtcaatattcctctgatcatcgctctggtattcaccccgacgctggttgccaaatggagcggaatgtacaagctgaacgtcatgagctatactctggcaaccgttgcccgtgctctggtcgctgtggcaggttatatgggcagcggtaatgttcccctgatgctgctctttaccgcaatcgctgctctgggtcagggtccttggcagggcgacatgaacgccgtgatcgcagcctgctccgagtacacttggctgacgaagcataagcgcgtggatggcacgatgtactcctgcacttctctcggtgtgaagctgggcggcggtctgggtactgccatcaccggctggctgctggcagcaagccattttgacagcgctctgaccgttcagccggattcctgcatcaatatgctgaagatcatgtatctggtgattccgtttgctctggatgccatcatcaccttcattctgtctcgtctgaaagttgaagaagcaaacaaacagtttcgtgcagcaatgaataattgagaacagttcctgctctctcgacccataagacaccaagacccacacgacacaatcgtgtgggtcttggtgttgccttggaagaagccccgccgaagaacatctgcccggcattatacaagcgaaagaatgtatgaaaaagaagaagcacatctcagaagagcagcattatctatgtgaaatcggtctagaaaagatgccatatggatcttcctggctcttcaaatcttatacagcggaaagtctcacgcacatcacgattacggcctattataatgtggacgaggcttttcttcaaactcccactgcagcatggggaaatctaagggattgccgtgccgcgcttcgcaagttggtatcctccgtctatctggaaagcgatttgaaccttccattcggaaaaaacggaaaattcttattccaacttgggtatactcctgttgtgtccgacatgaagaaaatcgttcagaaaactgccgcattgtctttccccaaatgggcgttatccgtatgggatatggatactgcaacattatatatgatcaaatacgacagacgtcattgattttctttgtttattccgtcctttcattggcgttacggtaagaaattaacgtcctgccgttctccccgcatggctttcctgccccctctcggcggcgttttccggctctccttctcagggtcatcgccgggtatcccatgcagacggtcatgctgttttcaaggtgcaacgagcaaaacggcaacaaaaaagccgtcacaaaacagaccagccctgccttcgctttttctggaaggtcatgctagtcggttatgtaacggctgaaagccaaaatgttcagccccgcagggtctgaacgaatatgtaaaaatatgttatattcaattgttgggataaattaccacaaaaatcgagccgtgtcaacaaaaagttttgagaatacgctgatttcggcagggtgcaagaaaaagcgagggaaattttggcaaaaagagagagggctggacggtgccagccctcttgacaaagaataaatcaatcgatcatttttaataatcgtccatattataaataattgtccatagacaaacacaagaacaacttgtaaaatacttgacggatagtcaaggctaaccacaaacaacttgagaggatgatccatgtatgaaaaggacgcggctgacgatctttttgttgataatagcatcgattgtatctgcggtcattacgctttgcatgggcgcagttcaaatcccggtacaggataccttgtccgtcctgcttcagcatctgtttggggcagatactggcacgcctgtgtccattgccttcgagcagattgtctggcaaatccggatgcctcgcattattctgggctttctggccggaagcggtctagccctctgcggctgtgtgatgcaggccgttgtccaaaacccaatggcagacccatacattcttggcgtgtcggcaggtgcaacgctgggagccactggttcgctctttctggggctgggtgtgatttccggcttctgggcctttgtaggagctggcggtgcctgctttctcgtattggccctctcctcggcggacggtaaaaccacctcggtcaagctgattctctctggcatgatcgtcaatgcgctactgaccgcattttccaactttatcattgcagtagcaggtgattctgacggtatgatgtccattaagttctggacgatgggttcgctgacccgcgccggatggaaaaatatcggcccaattgcactgatcgtactggcagcagcagtcttttttcggacgcaggcccagacactcgatggtctgatgcttggtgaggaagcagcttccaccattggcatcaacaccttccggtgtcggttggtttatctgctggtgctctccgtgctgactggtgcattggtatcggtctgcggcacgattggctttgtagggcttattatcccgcacgtttcccgcgccattgcaggcacagcacaccgaaaactactgcccattgcagcattatccggcggactgttcatgctttgggtagatgccatcgcccgcagtctgatttccaacaccgagctgcctgtgggcattttcactgccttggtgggtgcgccgttcttcgtctatgtgatggtgcgtaaaaagtatggatttggaggcaattgaatgagactggatgcaaaaaacgtcagcgtttcgattgctggaaaacccatcgttcggaatctctccattgaggtgccggacctgaaattctcagccttgctgggtgccaacggcagcggcaagaccactctgcttcgctctatctaccgcacacaaaaaatggacagcggtatcgttcgtctggacgacaaggacatcacacatttttccggcaaaaagctggcgcggaacatggcggtgatgggccaattcaaccagatcaattttgactataccgtgctggacatcgccctgatggggcggtatcccttccattccctgctggagcaagaacgggagagggactacgagatagctttggaagctctggacaaggttggtatgaaaaactaccgtgaccgtaactttcagtctctctcgggcggtgaaaagcagcgggtggttctagcccgcgcgctgacccagtcgcccaagatcctgatcctagacgaaccgaccaatcatctggatatccgctatcggctggagattctttcaatcatcaaggaactacacgttacggttctggccgctctgcatgatctgagccttgcggcgcagttctgcgactatctctacctaatgaaacagggagaaatcgttactcaggggatacccgaagccgtaatgactcctgaaaacctgcacagtatctttgatgtcgaagcctgtgtttaccccagtccagtcaacggacaactaatgatccaatatttataaacgcgggagtaccccgcagaaagaggaaaatttatgaaaaagaaaaccctgagcgttgccgctgcggcacttgccaccgtcatgctggccactggctgcagtcagactacatcttctgtggcatcgtccgttgctacctcctccgagattgcttcgtctgttgccgagagcaccgtctccgccgaagagacctcttaccccctgaccctacagatttatgacgctgatggcaatgctgtggatatgacctacgatcatgcccccgaaaaggtgctgtccacccagttgtccatgaccgagctgctcattaagctggggctcaaggacaaaattgtcggtgtgttcgataatgacaacgccctgaaaggcgacatcgccgatgaagttgcttcgctgaacagccttggcgataagaagtctgtttccaaggagactatccttgccaccgagccggatctgattcttggcaagggtcctctgatgttcaccgaaagcagcattggtaccgtccaatcctatcaggaactgggcattcccgtctataccgagttggccagtgcttccaccgaccaggctctggacaacatcgtagaagatgtgcggaacattggcgagatcttcaacgtgcaggagattgcaaacgcttacgctgacgagctgcaggagagaatcgacgcgctgatggacaaggtcagcggccagagtggagagcccctgaaggttctgttcatggctggctacgccgatggcaccttcgtggccttcaattccaagatgagcagttgtatgctgaatgccctgaacgctgagaatgttctggacaagggcggcaacggcctgactctggagaatctggtctccatgaacccggatatcatcgtctacgtccgcgcagaccgctttggttccaccgatgccgacgctgtggagcagctaacctccaacgccgtcgtgcaggaggttcccgccatcgccaaccagaaggtcatcgagatggattatgatgacgtaatggactacggtgcacgggtcatcgattctgctgagaccctgtacaacttcatgtacagtgcatcttaacggaacctgaaatcaaaaatttcggttatggcagaatacgggtgggcggaaagcccatccgttttttgtaaatgcggctgaaataacaggcatctcggtagccgacctcatgagcggcctgtgtcacagtgtagtcgccggaacgcaaaagctcagtggctattcggacacgataattgatgaggtaatcgatggggcggatgttcttatacttataaaagaggtaactgacatgagccgctttctcgttgacctgctcagccaatgtgtccagtgtcagtggctcggcgtaatgctgggcaataaaatccagcaggatgttcataatctggctctcgttataagtttcctcgggctgaaaatctgcaaaaatctgggcgaagaattcttccgtcagcttttcttgctggtactggctgcggatgtcagcgtccgggtggagctttaggatctgctccaaaatggaaaaggtctgttccggatttttgagcttgtgggagaacagcaaaggccggtcgttttcgtagtacatattgatatagtggaaatcctgctcgcccaaggccgaaatggtcagggtcttgtcgggacatccgtgcaggaatagtcctcgcttggcaatgaagggttcgtgctcaaatgagaagatggcccgacccgacaccggaacaatcagtgcacttttcagggtgcggtagctattactctcaccagcgtgcagggtaaagctgcggaagccgacagactcgattcggccctgattgtattcctgaaataaaatttccagcggattaggaagcgcggatatttgattcattgggagctcctttgtgcaaaagtggttagttaatgctaatatagcacaaaaagctaccgtttgtctatgtggggagcaccccacactgcgtaaaaattaacaaaaaggacggtcatggatggaaattctagatctcggttcacatcgaattggagtccggttcccggaaaagggactgcgcaaaggcaaaaatcctgcaatcctactcaacgatggggaactgattgagcagttgaatctgcgcacggaacgagcagtgttggtgggggtataccccaataacagactttcagagtataccccgtggccggaaccggctattcgaccgggcacaccggattttggcgggcagctaggacaatatcatcgagaactgaacaacgaaattctcccggtgcttatagacgaatacgcccttgacacggaaaagctggcgtatggcggctattcgctgggcggtctggctgcaaccatgagtctctgggaaacagatgcctttgctgcagtattttccctttgtgggtcgttctggtatccgggtgttgccgatttcatagaggaacatgttcccaaaaaccacttcgcacaggtttatctgcaaaatggtatccgggagggcgaaggccacaacaaccgcctgtgtgatgcctatagctatgcccaacgagtccacactgccctgcaagcgacatgtggagccaaaactgtgctggatgactacggccatcatgaccggcaaagtgagcgtcttaacgctgcactgcgttgggtggaacgtgtgctatgaatcattggcgtaaattttggcgtatgctgaatcaaggtgcattttataatcaccagcgacgagctgatttaaccgcagggaacgccgattggtagcataaaatccttatatgaaacaaaaagcggcagctacgttgtttttcgcaacatagctgccgtatcttcgttttgggagttcggtgtacctactacaccaatccgcctattcacttgttacaccacaccgctttgtaaggctccttttcgggaaaacgtcccaaaattggtgtagttgtggtgtagtaccgcagatgttgtctgaaatccgatcaagatttcatcgtatattcgactcattttcacgagtgtctgctttttggcatcttcatagttattttagagatgtctcttatagggatacggagtgtgtcaaagttcaaaccgatgaacgcatccataacacttcacagcctgtttcagccgctccagatcatctgcatccgggtgagaaagaaacttctcctttggagctgtcggctttctttggttacaacgtttcccagttgatttttcgatcccgatagaaatactctttgtcgtgttcgctgatggggcgcagcacatggcatggatttcctaccgccactacgttagcaggaatgtcctttgtcacaacgcttcccgcaccgatcaccgtattatccccaatggtaacacccggcaccacgatcacgccagcacccaaccagcagttgcgtccgatgcggatgggcagattgtactggtatgctttctcacgcagttccggcaggatcgggtggtttgcggttgcaaggacacagttcgggccgatcatggtatgctccccgatgtagatatgggtatcatccacgcaggtcaacccgaagttggcatagacataatcgtccatgtgaacgtgctttccgccccaattggcatgaaatggcggctcgatccagcagcctgcgccgcactctgcaagcatttctttcaaaagctgcgcccgttttgcgtgttcggaagggcgggtatgattgtaatcatacagccgctccatgcaaagctcctgctctgccatgatggaatcatccgtggggtcatagacttgttggctgtggatcgcattttcaatcagcatcttgtagccctttcttttttgcaaatcgttctcacttacaacgggtgcaactatgcttatgccttttgggtttctttttctcgcaaagcatcataaacgcagcgggttccctgatgtgccatcagcccgcccagacattttttgttgtagcggacgcagcggtatatctgttttgcctgcccgtttttcagcttgttcacccaatctgggtctgctgacaaggtcaagtggtatctcccgttatttacgaaaaatttacagtggtatcctgtgtatttttaggtatctcttttcgaggaagaactgttttctctccgcagacgcataaaacacagccagaggtagaaatctgcacgtttattataataagccgacctctctccgtaaacacttttgacaaattccagtgattttgtgcatattttgttgtattgtctccatatactttccggcagaagcctctataataggtactgtatcctgcgtaacgccttatattgtgtggagaaagaagtatatgaaacctaacaaggaagcaaataagccaaggatcacctaccgctactatgagctgccggaaggcgaactggtgcaggccattacaggagaggactgggtctgcacctatggcacctatgccgaggatgtccatttccacaatgttatggagattggtatctgccgctgggggcagggtctcatggttctggaagatcagcgcatcgactataccgatggtgcagttacagtggttcccgcaaactgtctgcacacaactttgagccgtgataaaagcctgaactcatgggaatatctcttctttgatcctgccggaatcctgaacagtgcctttccaaacgaccctctgtttgtagaatctgttctgcatcggctctccagtgaggctctatgccttccgcaagaggatgcagtagaactggaacggcttattaccatggtgctgaacgaatgccagacaaagcatgagtaccataaagccgtggaacagaatcttatgacatcgctgctgctcctaatcacccgcagctatacggagaagaaaacccatatccgccccatgacggttggactgcagcagatcatacccgctattgaatacatcgggatgcactatatgaatccaatctccggggaagatcttgcgtccatctgttccttgagcgaggcacagctgcgccgtaagttcaaagaatatctcaatatgtcgccagtcgaatatctgacgatggtacgcatccagaaagcctatgaactgctcaattccaccaattatcccatgacggaggttgctctgcgggtcggatatcaggatgtttcctccttcaaccgcaattttcagaagatcatgggtgtttcgccataccagtataagaaaaacaacagcgactaccgtggtcgagtattggacaagaagatctctgccaagaaaggatggaagcatccatccgatccataagagaaagactttttggcattgtgtcgaagaaaacttttcttctttggtcaagctgacgaagccatcgttttacgcgcagaaacacggccggattctgattgaatctgcgtgttttttgattggatgcacccgcatttcaaccgcaaaacctgttacaatgactacaacaaacgagagcttggagaaaagaattgttcaacttgtgaatgcgttcgattctttcttcaaatttctcggattcgtcaactttttcaaggtttcatgaatgaaggagaaggcattatgaaaaagatctcgcgtcgtgcatttctgtccgttatggctgctgcaggtgcagctgcagccctgaccgcttgcggtggcagctctggttcttccactgctgcttccggcagtgcaagtgttggcggttctcagcccggtggtcacaagctgactgcctacgcatgggataagaatttcaatatccctgctctgaacgctgctgccgcagactacaaggaaaatgttgacccggagtttgaactggaagtgatcgagcagtccggtgcaggtgatgtagaaaatgccatcacgctggcaggttctgcacacgattattccaatctgcccgacatcgtgcagttccaggatcactacatccagcgttatgtttccgattatccggacgccttcgttcctatggaaggtgccgatgttgactgggatggtttcggaaaggaaaagctgtcctactccatcgtggacggtgttcactacggtgtgcctgtggataacagcaccgttatctttgcatatcgcaccgatttgctggagcaggtcggtaagactatcgatgacatgaccggtgcaacttgggccgatgtaaccaaagtcggtgaagatgtttatgccaaaactggcaagtatctgttctcctgcagcggcgataacggcgacctgatctacattatgatgcagtctgagggcgttgccgagttcaaggatggtgagccttacatcactgaaaatgaaacgatgcaccgtgtctgcgaaacaatcgttgacatggcaaagaaaaacgtctgctatctggcgaacagctggagcgactacatcgaccagagcattcagggtgacatggttgccggtgttgtgcagggcaactggatcatccccaccatggaggctgtcaccgggaactccggcaagtgggagatcaccaccattcctacgctggacggcggcgagggctatgcttccaacggtggtagcggtctgtatatcactgccaactgcggcaatgttgatctggcaaagtccttcctcgcatataccttcggcggcagcacccagacctatgataacgccctgcgtgacggcggcgttgtcaccacggttctgaagtgtgcagactccgatgtttacaacgagggcgtggagttcttcaacaacgagccggtttataagcagatcgttgagatgagtgaaaatgtgcccatcatcgagcagagcgattatcacgtccgtgctggtgtgtatctgaccactgctgtgatcaacaccatcaacggctccaatctggacgatgaactggcaaatgctgaacagcagctccgcttcgagatgggtctttaagaccttctgattcatccgaaggagggtttgacattgaagaacgaaaaaagcggttctctgatggcaaaacagcgtcgtgcgggctggtattacctgatgcccggcacggtccttattaccatcatgagttttatccccatcatcaacggctttctgacctctctgaaaacgggttccagtgcaagcatgaagtgggccagcccgctgacctacaactatacccgaatgttcaaggatgcactgttcctgcgctcgatgggaaacaccttcctgtatctggtcgtagaagttccgatcatgctgattctggccattctgctggcacagctgctgaacaatcacgatttgaagttcaagggattcttccgcacctgcgtatttctgccttgtgcaacttctctggtttcgtactccctgatcttcaagtccctgtttgcaacggatggtctggtaaacacggttttgtgcaagctgggcatcctgcaaacgcactacaacttcctcggcaatcccaccagcgcaaagatcatcattattctggctctgatctggcgctggacaggttacaatatggtgttcttcttggccggtttgcagaacatcgactattcggtgtacgaagcagccaaaattgacggtgccaacggctggcagacgttctggaagatcactgttccgctgctgatgcccaccatcgtgatgaccgccatcatgtccatcaacggtaccttgcagctgttcgatgagtcggtcaacctgaccaacggcggtccggcgaatgcaacgatcaccatgtcgcactacatctacaacaactccatgggtcagggcgttgcaaacttcggctatgcttcggcattgtccttcgtcatcttcgtgatggttgccatcctgtcctttatcagcatgaaagcaggtgacaagcgtgactaatacagcagaaacccacgcacttgtgcagcgtgaaaaaggcaagaagcacatgatccagcgcagactgattcctgcttacatcttcctgatcatcatctcgttcatttcggttttcccgctgttgtggatgatctctgcggcgaccaatacctcactggatgttgcccgcggcaagatcatgttcggcacctatgcgatgcagaacttcaaaaatctgatcgcatcgcagaatctggcaggtgccatgggcaactccttcctgtatgcgatcgtgcagactgtgatttccatgttcgtctgctctcttgcaggatttggttttgagttgtatcatgataagaacaaggaccgcttgttcagcatcctgctgctcgccatgatggtgccgcaggttgccacaatggttcctttgttcaagatgatgtccagagccggtttgctgaatagtgtctgggcgttcatcctgcccagcatttccactccgttcctgatcatgatgttccgacagaactcccgcaacttccccaacgacctgatgcaggcagcgcgcattgatggcctgagtgaaacgggcatcttcttccggatgtatgttcccatcatgaaatccacctatgcggcggctgcggtcatcacgttcatgaacgcatggaacgcttacatgtggccgaaggtcgttatgaccgataaccgtgcacagaccatgccgatgttgatcgccaatattgcgtccggctactccatcgactacggtatgttgatgatgggcgttctgttctgctccatccccaccatgatcgtgttcttcgttctgcagaagcagttcgcagagggcattaccggtgcggtgaagtaattctctatcttttcgctacccactttttctccttcatctgctgttcccccagaggaatccccatctcctctgggggacgatgaaggaatttttttcaatcacataataaggtaaatgaggaacaatatgtctgcatttgattttgcaaaagtaaaagaccccacctttttcaaggaaaacgtgctgaatgctcatgcaagtttccgtacttacgcttcccgcgaagaatatcggacaggctcctcttctttggcgatgaagctggacggtatctggaaattcgcctacgcaaagaactacaccagtgccatccccggctttgaaaagacagattacgattgcagcggctgggatgacattcatgttccggcacacatccagatggagggctacgacattccccagtacgcgaatattcagtatccgtgggatggccgtgaagaagtacagccgggtgagatcccgcagcggttcaatccggtggcaagctatgtaaaatacttcgagttgccggaatccatgcagggcaagcccgtccacatcgagttcgagggtgtggaaagcggcatggctctttggctgaacgggtcttatgtgggttacaccgaggacagcttctccgcacacgcattcgatctgacttcctatctccagccgggcgtgaacaaacttgctgtgcaggtgttcaagtggacttcctccagctggtgcgaagatcaggacttcttccgcttctccggcatcttccgcagcgtgtggctgtacgccatccccaccgtgcatctggaagatatatccgtcaagacgctgtttgccggggatgatttcgctcattccacgctggaagttgcattgcaggtggagggtaagggcgcggcccgtctgaccctgcgccgcagtgaactggaagtgttctccgaaaaaatcgcactgaacggcggttctgctctgttcagccatgcggtggagaacccccacctgtggagtgcagaggacccggctctgtatgaactggaaatcgagctgctggacgatgcaggccatctggtagaggtgaccgggcagaaagtcggtttccgcaagttcgagttgaagaacaatcggatgctgctcaacggcaagcgcatcgtgttcaagggtgccaaccgtcatgagttcagctccattacaggtcgtgctgtgggcgtacacacccgtgaggaactgcttcgggatatcatcaccatgaagcagaataacatcaatgccatccgtaccagccattaccagaatcaggatgcactgtacgccctgtgcgacgagtatggtctgtatctgatcgcagagaacaatctggaatcccatggcacatgggatattcatgaggctggcattcgcggcatcgagggcgttttgcccaatgataagccggagtggaaagctgtcttgtttgaccgcatgaattccacttaccagcgtgacaaaaatcatcctgctgttctgatctggtctctgggcaacgaatcgtttggtggtgagaccctgctccagatggcagagatggtccgccgctttgatgacacccgtctggttcattacgaaggtgtggtcaatgatccccgcttcctcgaaaccaccgatatcgagagccatatgtacagcactgtgaaggacattaaagagtatctggcacagggcgataagcggccttatatcgagtgcgaatattctcatgctatgggcaactccaacggtgctttgcacaagtacacggaacttgccgaccagaaggactgcggctatcagggcggctttatctgggattacatcgaccagtccatctggaaaaaagaccgctacggcaagtggttccaagcctacggcggcgacttcggtgagcgtcctaccgactataatttcagcggaaacggcatcgtctatggcagtgaccgcactccctctccgaagatgcaggaagtcaagttctgctaccagaacatcagcgtgacgatcaccgccaacggattccacgtctggaacaagagcctgttcacttctaccgatgcctatgactgcgttgcactgctgcaccgggatggcaaactggtgcaggaacagcagcttgagggtgtttccgtggcagcagaaagccatgcagatttcccgctgccgttcccgattccggtcattcccggcgagtatgcgctcaccatcagcttccggctgaaagaagataccatctgggcaaagaagggccatgaagtcgcctttggacagggtgtgattgctgtggtccgttccattcccagcaagaaggtcacgccgtttaccgttacgcacggtacacacaacatcggtgttcgtggtgagaatttcgatgttttgttctccgatctgaacggcggtctgacttcctaccgctatgccggcaaggagatgattcaggagattccccgtcccaacttctggcgcgctcccaccgacaacgactgcggcaacaacatgggcggcgttcgcggtcagtggaagctggcaagcctgtacgctaccgccaagggcatcggcaaggaaatcccgtctgttcatggcggcaccatcctccagaaccccacctgtgaggtggaagccgacagcgtggtcgtgacctatctctataacctccagaccagccccgcagcagagtgcagcctgcagtaccgtgtgttcggtgatggccgcatccagaccaccctgcactatgacccggtggaaggacttgcagcaatgccggagttcggcgtactgttcaagatcgacgctgactacgacacggtggagtggtacggaaacggccctgcggagacctactgggatcgtcagcatggtgccaagctgggcatttaccagaacaaggtcgcagacaacatggcgcagtatcttgtgccgcaggagtgcggtgcaaagaccgctgtgcgctgggcaaaggtagtggaccgcaagggtcgcgggctgctgtttaccgcagatgccgcaaagcccatgttcttctctgcgctgccctacactccccatgaaatggagagcgccaagcacccctacgagctgcccccggtgcattacacggtgattcgtgccatcggcgagcagatgggcgtcggcggtgatgacagctggggtgccaatgtccacccggagtatattcctgatgtaaccaagcctgtggagttcacctttacgttccgtggcatctgatgattgcccgcaaatgaggtgttctctgtgaaaaaagcgaaagatcagtctgaatctgaaccagccgaaccagcatcccttgttggagaacggatcagaaagatacgcaaagaagaggggttaagcctagagctttttgctttacgttgtgacatgaatgccgcatacgttgggcatattgagcgcggcgttcagaatccaacttgaacacgctggaacgtatttgcaagggtctggacatcagcgtagaagaccttttcatagataaaagcgcaacagttgatatgaatactgccgcattgcagtatttctctcagattactcgtgatctttccccagaacaatttcatcagctactaaacatcataaaagagatcgtagccgtgatgagatgaccctcgttattaagacaccttcgcgttgagatatggacatccctgcatgagattcctatcaaaagcgagggtgtcttttttggtatcacaaaatctcaattcctgacaccactatttataagtagtgcttcgctctatataagtagcgttgctatgtcaaaataaccgtattcggcttttgcttagagcatttctttgaatggttctccaaactttctttaacgtattgaagtatacaaatttttaggatataatcagcacattccccaaaagctatatagaattacacaaaaatttgataggaggcgtacacacatgagttgtttcggttcaaggtttttattagcaaaacctgcaggctgcaaagttgctggttgtgctcatccgcacccctttgcacaggttcatcggctaatgatagaaccggattggctgatgaaagagcctccagcgggaagttttctaccatctctcctatccaagctgcggcatcgccacccatcttcgttgacggaggtcggctgacatgaaggatcgactgaaagatcaccttgaaggctggcagttttgcgaaaactgtggtataaagctgtatcaaaaaatcaacggctgcagcggcatgattcatctgaaatgccaccgttgcaatacgctcctccgcattgatttatcattccgaagaaagaagtgaccccctaaaacaataaatcgggtgcattgcaccctgaatatggactgttcgcaccgagcaacgggccgtcacctccgggtgatgtatgaaacgtagcaccaaatagccgggcaacagcctgattgagtgattttcgcttgagaatctctcagtcggctgttgtccggctattttttatagcttcaggaagcctgctcccgaaaaggagcaggctttatgtttgtccgtttttcgtggatgccccaagcggcgaaatatccgtagccttccaaattttcgacatttcacgttttatcgaaaatttggaggttacacatgagtttcaataatggcaatgaacgtcgcaagctgaacgcaaagtgggagcatcttcgtgtgcagtaccgcgaagcaggaatgagcgaagatgcaattcaggctatgtacgagtttgatttgggtgttctcaatagcgaacgtgcctacatcactaacacaatgacggtttctggtgctgccgatgattgcgcagccaaggaaaccagcgacttcaagcagtatgaaaaagccgttaccgtaacggatacctaccacgaaaccaaaagccgttttgcatggattggtgagattgagaacgaacagttgcttactgcactcgaaactttgaaagtcgaagatttggaaatcatcaccatgtacgcttacgagggatacgacatcactgaaatatctaaagtctacggcgtatcccgccccactattagcataaaaatcaagagaattactaaatttttgaaaaacttcaattttaatgctacgaattgacccttctcgatggctcgtaagtgtaagggcaattcaccagatggcgaaagccgctgaacgaaatgtctgcactcatgttctttgaaaactgaatagttccgtcatctggtactccgataatgaaacttccgtaattcgcggcccggtcacaaagcagacggggtggctgaaatgccaatgaagcggtacaagtccgctgccagatgtttatgccccactcgcagggagccgagggcgaatatgcgagaccttaacttattaaatcaggcgtggccgaatgctgttttcggccttcgtccacgcctgttctttttacttattccatatatccacattttcgtcctacataggaggttttatgaacgaaaacgaccgtaccaccttagagcaagcaatctacgaggaaatggaactgaccccggagatgatccggtccatccgcacgctctgcggtgtctgcctttgcagttttgtagaatccaaggcgttcaaaatcgccattgttcccagcgcagaccgaagcatggacacttgcactgtctgccagacccggcgcggtcatgactacgttgtgatgaaccgctgaacaaacacaccgcccaccgccaaggaggtgcagcgggcggtgtacatattttgaaaaaaggagggcagcttttgattcaaaactggaaattccagcgtggagacattttcttcacccgtttcgacaacgccaccggttcagagcaaagcgggaatcgtccggcagtcgttctccagaacgatgtggggaatttttactcgcccacgctgatcgtggccacattgacaagcaaggctgcaaaaaagtatacccagccgacccactgcctgctggtgaacgattttctctccgttccgtccatcgttcaggcagagcagatctttaccatagacaaaagcagggtgctgaaattcctcggacacctcaccccggaggaaatggaccgagtggatgatgctgtccgtgccagtctcgccctgaacccgatggggagcattcagcggcttccacccatcatccgctctacggaggcttacgcaccgcctgaggtggttgacggtaagccgcccctctatccctacacacccatcaaatcgtcctttgaggacgctgggagcgtcgaggacatgatgctgtacaccgagttggaagctgcggtacacgcaatgatccagcggctggaatacagcttcacgtttaaccccagcctgctcaccatcccgaaacggaagcggcaggttgctgaaatcctgaaagaagccgaaacctacatctggaggatcaaggaggaaatgcgatgcgcctgaaagacaacaccaatcccttcatccatgtcaacccgccgtaccagctcatggtcatccacagcagcaagctggtctatccccgcgaactgtatcagcgtggtgtggagcgcaagcgtgtggaactgatcgccgcccacttcaacgaatatgtggcaaacgagccgaaggtcagtttccgtaacggtcagttcatcgtaacggatgggcagcacaccatcgaggggcgcatcctccgcaacggcggcaaagatctgccgattctctgcaaggtgtacacgggcatgaccgtggaacaggaagctctgctctttgccgagcagaacggcttctctgcgccgctgacggcaggcatcaagctccgtgccaaggtggtgggcggcgatgccatttccaaggcgtttctcgcagccaccaaccgggtggggttgagtctcaattatgacagccagcagctgactgattaccgcatcggctgcgttggtacggctttccggctctacaagcagatgggcgaaccgctctactgtgaaacgatgcggctgatcgtggcagcatgggagggcaagcccgattcgttccgggcatctgttctgaaaggtatgatgcactttgtggagctgtaccacggcgagttcagtgaagaacggttgctccgtgcgctgcgcaacatccacccggtcgatatttaccgcatcgggcaggacgaccccgcaaagctgcgcggatggaaaaaatacgttttccccatctacaccgcctacaacggcaagcgcagaaaagacgcactgccgatgaaattttgatgttcacaggcattcctcccatatacacaaggggcatccgcaaaccgcagatgccccttgttacatattaagaccctattatttaattattaaaacacacaggaagggtgattgaatggtcgataaattttctcaggtcgcatccaacatccctgcggctaatgctgataccaacaaacagtatttggtaatcaacggctatcccgttgttttcagcttctccaacgaaccgaacccggaagcatttgaacgtatccgggatattctgcttgccacaagctacacaaagaaagcgggttgacatcgtggacgaaaacctaagcactcgttatactgaggatggctgtggtgttttggtcagacaaagaaccacgaccacccgttctttggcaaccgaatagtacccattctcacttctattataaagtgaggaatcgaaaatgaatgaaatgaacaatcgcgtctgctgcctgtaccgtgtttccaccgacaaacaggtggatttcaactcgaatcatgaagcagaccttcctatgcagcgcaaggcgtgtcacaaatttgccgaagcgaagggctgggtcatcgtccatgaggaacaggaagagggcgtgtctggccacaaagtccgtgcagaagcccgtgacaagctgcaaatcatcaaggattatgcccgaaaaggcaagtttgacattctgctggtgttcatgttcgatcgaatcggacgcatcgcagatgaaacgccgtttgttgtagaatggtttgtgcgaaacggcatccgggtgtggagtacccaagagggtgagcaacgattcgacaaccacactgacaaattgttgaactatatccgcttctggcaggcagacggtgaaagcgaaaaaacttctgtccgtacccgtaccagcctgcggcagcttgtggaagaaggacacttcaagggcggcagtgcgccgtatggttatgaccttgtgaaaagtggccgcatcaacaagcgcaagcacgaactgtatgaactgcacatcaacgagcgtgaagctgccgtagttcggattattttcgataagtacgtgcatgaaggctatggaccgcagcataccgcaacttatctgaatgataacggctaccgcgcaaggtctgggaaatgctggcatccggcaagtatccgtggaatggttcggaacctgacctatacaggcgttctccgctgtggggatgcccattcggaattgctgcaagagttgcagatcatcccagcgcagcagtttgaagccgcccagcgtatccgtgaaaatcgttctaaccgtgcagcacaagaatccgaatatcgcgttccgctgaacattcacggacaatctctgctttcgggcaatgcttattgtggacattgcggtgcaaagctgaccttgacttccagccggaagtggcgcaagctctccgatggaacactggacgatacgctccgtgtccgttatacctgttacggaaagctccgtaagcagaccggctgcaccgggcagacgggttatacggtacatattttggatgaaatcattgataagtcagtccgtcagatcttttccaaaatgagaggcatcccgaaagagcagatcattacaaggcgttacgagcgggaagttgtcgaacgcaagaatcatctgcaaactattcaggtagagcgggataaagcccaaaaagacttgatttccctgaaagccgagattcttgcctgtatcaaaggtgagagcgtctttcccaaagaaacccttgtcgagatgattacagcgcaggaggaaaaacttcgggaattggatgctctttatgaatcttcctatgcagaaacagaaaaaactgccgaactgatggacaacgtatcaaaactgtacgaagaactgatttctttttctgatctctacgacagtgccagttttgaagcaaagaaaatgatcgtcaatcagcttatccgcagggtagatgtttatcgtgggtatcagctcaacattaccttcaacttcgaccttacgccgtacattgaaggggatgatacaacagcctgctgaaaaaacgggcggaaaacattcctttttgaaaatggtgtaaagtcaaaagttgggggttgtataggaaccgcctgcaaaagcctgaaaacggtgcaggcgaagcaatgcagcccccaaaaatcggcttcagcaaaaagaaaagcaccatacttcctacgaagtacagtgctttttggtggagaataccgggatcgaaccggtgacctcttgcatgccatgcaagcgctctcccagctgagctaatcccccataaattccagaagcaagcctctggaatggaaaatctttagtgggaacttaatcgtcatcaaccatcgctgtgggggtgtgtttctgggtgcatcgcgctcccagctgagctaaacccccagatgtctggcctgttgcctgacgacatgggttattataccagccggaggggcgcttgtcaacggttttttacaaaaatctattctcttttttcagcggcgcagcgcacccggaagcttttgacgcagctgcgtttttcccggggctgctctgccgcaaaagactgccgcattacctgtcccatttgtcacacagggcgttgatctggtcggcaaattttgccagatccttatttgcgccgccctcgttgtgctcgatgacccgcagcaggcgcttaccggcgctgaccagccgctggaacacggtagcggcgcggtttgcaccctcgcctgtcctctgctccacgcggactttcgtgccctcctgcaggcagactgcgccctcggcaccgatcgcccactgcgcaccgttgtagggcgcacaggcggtaaagccctgttcggtcagggtgtccacaaagcggttctccacctcgtcctcgccgtggatcacgaacacccgccggggcttttctgtaaaggcgttcacccagcgcagcaagccgtctttatcggcgtggccggacattccggtcagctggcagatctccgccttcacctcaatgggctcaccgaacagcttgaccaagtccgttccttcaatgagggtgcgtcccaaagtgcccaccgcctgaaagcccacgaacaggatcgtgcattccggccgccacaggttgtgcttgaggtggtggcggatgcgtccggcttcgcacattccgctggcggacaggatgaccttgggcgtgcggtcggtattgatcatgcgggagtcctcgctggtcacgctgatgcgcagccccggcacgttgatggggtcgatgcccttttccagcaaagcgcgggtctgggcgtcaaagcagccggggtctgtatcccggaagatgcgggtggcttcggtggccagcgggctgtcgatgtagaccgggaagttgccgtgccctttgaccagccctttttccttgatctcccgcaaaaaatacagcatctcctgcgtgcgtcccaccgcaaagctgggcactaccacgttgccgccccggtcaaaggtgcgctgcaaaatttttgccagctctgccacatagtccggccgggggtcgtggttgcggtcgccgtaggtggactccatgaacacatagtctgcctgctggatatagttggggtctttgatgatgggctgctccagattgccgatatcgccggagaacaccagctttgtggtggtgccgccctcggtgatccacagctcgatgctggcagagcccaacaggtgtcccacgtccacaaagcgtgcttcgatgcccggggcaagctggatgcgcttgtcgtactccacgccccggaacaggcggcaggcggcttcggcgtcctgcacggtgtacatgggctctaccggctctgcgccggagcgtttgcccttgcggtttttccactcggcttcaaactcctgaatatgcgccgagtcccgcagcatgatgccgcacagctccacggtggggatggtggcgtagatcctgccccggaagccgttgtgcgccagcagcggcaaaaggccggtatggtcgatatgggcatgggtgatgagcacaaagtcgatctcgccgggggctacgggcaggggctggttctcgtacacatttttgccctgctccatgccgtagtcgatgaggaatcgctgccctgccgcttccagcatggtgcagctgccggtcacctcgtggttcgcgcctaaaaacgtaagcttcaatgcagaacacctccggttcgttttatagctttagtatagcatatttttaaggtacacgccgcacaaatctgcggaaagtttacgggcataatgctgaattgcagaaaaaatttttatacaatcttgacaaaccaccctgttctgttataaacttaggtttgtatgacgttcgttcgtattttatgagtcttttcaaatagagaggtagaaatttatggttcgtaacgatttgcgcaacgttgccattatcgctcacgttgaccacggcaagaccacgctggtggatgccctgctgcgtcagagcggcgctttccgcgacaatcaggccgtggccgagcgcgtgatggacagcggcgatatcgagcgtgagcgcggcatcaccattctggcaaagaactgctcctgcacctacaagggcgtcaagatcaacatcgtcgacaccccgggccacgccgactttggcggcgaggtggagcgcgtgctgaagatggtcaacggcgtgctgctgctggtggacgctgccgagggctgtatgccccagacccgctttgtgctgcagaaggctctgcagcagaacctgagccttgtggtggctatcaacaagatcgaccgtcccgatgcccgcatcaaggaagtcatcgacgaggtgctgtacctgctgatggatctgggcgctaccgacgagcagctggagtgccccatgctgttctgctgcggccgtgacggcaccgccagcttggacccggatgtgccgggcaccgacctgattcccctgttcgacaccctgctgagcaccatcaagccgccggagggcgaccctgaggctcccttccagatgctggtctcctctgtggactacaacgagttcgtgggccgtatcggcatcggccgcatccagaacggcgttgccaaggtgggcgaggaagttgtggtgtgcgactggcacaaccccgacctgaagatgcgcggccgtctgaccaagctgtatgacttccaggcaaacggccgtcagccctgcgataacatcaccgcaggcgatatcgtggccttctccggcctgccggatgtgaccatcggcaacaccctgtgcagccccgctcagatcgagccgctgcccttcgtcaagatcaacgaccccaccgtggagatgaccttctcggtcaacgacagcccgctggctggccgcgagggcaagtacgtcaccagccgtcagatccgcgaccgtctgcagaaggaactgctgaaggacgtggccctgaaggtggaggactccgccaccactgattccttccgtgtcatgggccgtggtgagatgcacctgtccatcctcatcgagaccatgcgccgtgaaggctacgagctgcaggtatctcccccgcacgttctgaccaaggtcatcgacggcaagacctacgagcccatggagcacgttgtcatcgacgtgcccacccagtatcagggcgctgtcatgaccggtctgggtcagcgcaaggcactgctgcagcagatcgagtctctgggcaccgaccgtgtccgtctggagttccgtatgcccagccgcggtctgttcggctaccgcaaccagttcctgaccgatacccacggtgagggcatcatcaaccagatctttgacggctacgacgtctgggctggcatgatcgctaaccgctctaccggctctctggtcagctttgagaccggcgacgccgttacctacggtctgtacaacgcccagcagcgcggcactctgcttatcggtgctggcgagaaggtgtacgagggcatggtcatcggctacaccgcttccggcgaggatgtggacgtgaacgtctgcaagaccaagcacctgaccaacacccgttcttccggctccgacgacgctctgcgcctgatcccggtcagcaagctgagcctggagggctgtctggagttcctggcacaggacgagctgctggaggttaccccggagaatctgcgcatccgcaagcagatcctgaaccacgaccagcgcatgaaggccaagagcaagctgaagtaattttacaaaagcgactttattctagcggcgcagaagcacccacgggcgtttctgcgctgcttttttgtgcccggtaattgcccaagccgtcaggttaataccccctcagttaaagcctagcggcaaccggctggaactcccccagtctcgctgcgctcgacagccccctctaagatggggcctttggcatggcggcaaggtttctggctaaagtgcaaagttcccgggcgcgccagaggctccctctccgagggagctgtcacggcgcagccgtgactgagggagtttgcgtgccagtaccccctcaggcgctacgcgccacccgttcccccttttgtcgctatgcgacattttcccccggccgggggaaatctgtccccaaggggtgaaggctttcgctccgggtcaggctgcaaaaattgatttccgaatttttgcaaaaaaggcttgcaaaagcgcggtgactgcggtataatgtttctcgcagtcactgttatgcctctttagctcagtcggttagagcacctgactgttaatcagggtgtcgcctgttcgagtcaggcaagaggcgccagcaaagcgatggatatttttccatcgcttttttgtttttctgtatctttttttacgcattcttaacggttcttaaaaaatatcgccttgaagaacactagtggatgtggtatacttttataagtttatagatgtagaaaagctgcatggctttcccgcatccgcagacaggcgctcccccggtcagaaagctgccgtgcaggagcgcagttttttcgttggtcaaatcagcaggcaggccggcggctctgtgcggcaagcacgggcggcaaggcggctttgtgtcgtttgaataaatctgtagaataaaaggaaacatctatgcgttatacctacgtccggcagcacgataccaccgactgtgcggctgcctgtctggccatggtgtgcctgcactacaaaaaggaagtgaccatcacccgcctgcgggatatgatgggtaccgacctgaaaggcactaaccttgtcggcctgcaaaaagccgccaatgaacttggctttaccaccgccgcagtccgcgtggaccgcgaaaacttcctgagcgacttctcgcttccctgcattgcacaggtgatcaccgatcagggtctggctcactttgttgtggtgttcaaaaagaccaccatcaaggacgaaggcgcgcgccgcaagcatatgctgcaggacgccgagacccgcaaggaagaagagaaaaagggcaaaaagcataagtgcaaggattacgtcatcatcggcgaccccggcacggagctgaaaaagatcagtctggacgagttctacaagaactttaccggcgtgctgctgctgctgaaccccacctccgagttcaagggcggcaagcttggcagcagggacggtaaagacggcaaggacggtaaggacggcaagagcggcaagtacggcatgatgaagcggtatatcgacctgcttctgccccagaaaaagctgttcttctacgccatcctcagctcggtgatcaccaccattctgggcatcgcgtcctccatgttcaataagatcctgatggacgaggtgctgccctacgggctgaataaccttttggtcaccctgatcctggtgttcagcgtggtcagcatcaccagcacgctgatcggctttgtgcgccagtgggtgctgatccatctgtccatcaagatcgatatcccgctgatgctgggctacttcgggcacatcttcaacctgcccatgaagttctttgccacccgcaagaccggtgatatcaccacccgttactcggacgctgacaccatcaaatccatctttaccagcattgcgctgagccttgtgatggatatctccatggcagtcatcaccggcatcatcctgttccgcatgaacgccatgctgttctccatctcgctgttcatggcactggtcagcatcctgctggtgctggtgtacaagcagccctataagcggatcaacgaagagagcatggcacagtctgcagcgctgaacagccagatgatcgagagcctgcgcggcatcgagaccgtcaagtgcaacgccaacgagcagaccgagctggataatctggaacgcgagtacatgaagagcctgaagatcagcctgcgctccagccgcatcagcaccacgcagggtctgatctcctccttcatctccaccggcttcagtatgctgaccacctatgtgggcatcagtcaggtgctgaacggcgaaatgacgctgggcggctttatggcattcagcactctgtccagctactttacctcccccctgagcaacctgatcggcctgcagatgcagatccaggaagccagcatctccatgaagcgtctgaccgagatcatggactaccccgctgagaacgagactgccgagggtatggagcagagcgagatggaaaaggtggagggcgacatcgagttcaaggacgtcaccttccgctacggcaaccgtgccccggcactggatcatgtcagctttaccatccccgccggcaaaaaggtggcgctggtgggcagcagcggcagcggcaaatccaccattaccaagctgctgctgaagtactacgaccccgaggacggcgagatcgatgtgaacggcgtgaatctggcggagtacagcaaccactcggtgcgccgcgccatcgcctatgtgccccagaacgttgagctgttcagcaagaccatctacgacaacatccgcatctcccgtatggacgctacgctggacgaggtgaaggaagctgccaagaaggctgacgcgcacgagttcatccgccacctgccgctgcagtacaacacctatctggaggaagccggcaacggcctgtccggcggtgagaagcagcgcatcgcactggcgcgtgccttcctgaaggactccaacctttacattctggacgagtccaccagtaatctggactttgccaccgagacgctgatcttcaacatgatctacgagcagctggcagaccgctccatgctgatcgtggcgcaccgcctttccaccatccgtgactgcgacctgatccttgtgatggatcacggcaagatcgtggagcgcggcaaccatgaggaactgatggcaaaggatggccgctatgccgagctgtggaatatgcagcagggcatcttccgcaagcgcaaagccgagcctgctccgcaggcagttgccgctgtggtggaagaggacgacgacggcgagtccatcacctactgaccgcaccgcatccgcagctcttgcccggatgcagcataagcttttttcccgcccggcgggaaaccgaagaatgcctcgttatggtgtgcccggaggcagacgcttccgggcacctttttgttccggcttacattgaaaaaataacaggattaggggtaatttactatgaacgagatcaaagttgctgaaaacaagaccctcaagctgaccaatgttctctcccgcgttgtgcagcccgaggagctggcaaacctgccggtcatcctgacccagatgcagaactttatgaagagcaacggcgcacagcccatcggcccgctggtgcaggctatcgtggaaggcaccggcccggaccatatgcccgtcatgtacatgatgcagcaggccacccagatgatcacccagatggagcccggctaccacatggacgctgtgctgcgggtaaagaactgcttgtacgcccactttaccggccctctggccttcaaccagctggccaccgccaagctgcaggtcctggcttttgaaaacgacatcaagcttagcggcaacagctacaccatctacgtcaatcaggacgaggacgacggcgtgatcgacgtgtttatggagaccaaataattatgacaacgaccattcagaacctttcggatctgcaggaccgccggatcatgatggacaaaaagctgcccccttacgggtacgcctttgtcattctgaccgggctgttcatgatctttctggtgatctggagcacccagaccaaccgcatctatgtcagccagaacagcggtgtggtgcaggccgccaacaagacctacatcatgtccagctactccggctccattaccgagctgtatgtctcggagggcagctatgtgaacgagggcgacctgatcgcccggctgaagagcacggatctggatatgcagaaggacaccctgcagagccagctggatatctaccagaagcagctggatcagtacaacaagctgctcaagtgcattcaggacgacaccaactacttcgatgagaccagcgctgaggatcagccctactactaccagtaccagacctacaaaagtcaggtagcacaaaagacctttgacgcttctacctatcaggctgccggctactccgacacccagatcaaggctttgatggagcagaaccagagtgagctggagtccctatactactccaccatgcagtccatctcccagagcatcaacagcgcacaggtcaatgtggacaacctgcaggcgcagatggattctttgaacaccggtgccaacgattacttcatctatgcgcccacctccggcgtgatccacatggacaccccctacaaggagggcatggtgctgagcgccggctctgcaatggctactattgccagcgagaacgacgatctggagatcgtggctatggtgtcggtgaacgaccgtcccctgctgcacgtaggcgacccctgcaagatcgccatcaccggcctgtcggagtattcctacggcacgctgaccggcaccgtcacctccattgacagtgatgtgacctccagcagcagcacctcctactacaagatgaccatcaagcccgatgccacctatgtggtgagccgcagcggcgacaaggtggatcttgccaacggtatgagcgtgaccgcccgcgtggaatacgatcaggtcacctattttgagtatgccatggaggcactgggcgtgctgttccgctaaaagcggactgcacagcacggcaggatgccccccttttacaccaccccaaagaggtacaaacaacatgattcgaaccgcaaagaaactggccgcctgtgtgctgatgctgggtgtgctggtatgcggcaccgccctgagcgctgccgccgccggcctgcctgttgaagcgcagaacggcgtttcactgccctggtccaaggatgtccctgccgagagcatttccaccggcagctactctgccaatatgctgctgggcgcttctcagcagctgtcccccgtggtcaagcccagttacagcaccgactctgtggtctttttgaccgatgacagcagcgtgctgaccgtaagcagcagcggcgtggtgcaggctgtgggcgttggcactgccaccattaccgcagccgccggcaaccagatctgcgcctacaccatcgtggtttccatggactcttccatgatcgtgaccgagatggacctttccctctcctccaacaccatctatgtgggcaactcggtgtcggcttcgctgcaggtgcgccccagttccgcttccaactacgccaccgtcaccctgacctcctctaacgagaagatcgccacggtgaacagctttggccgcgtgaccggcgtagcgcccggcactgccaccattaccgctgcctgcggctcggtggtggccaccaccaccgttacggtgcttgccctgcccacagactccaccggcacaagcggcactacgtccagcaacagcgggcaggtgatcacccccagcaccaactacatcgtgctcaagcccggtgccacccgcaccatcacggctaaagccacccctgccagtgcatcccagtccttcaccttcaagtccggcaacagcagcattgccacggtcagcccttcgggcgtggtcacggcggtgggcaccggctctacctccattaccatttccaacggcaaggccactgccatggtcacggtcatcgtgaaccgctcggcagatgcttcctccggcagcgacaacagcaatgccggcaccgaaaccccggacgacaacacctccatcccgctggaccctgtggtgcagaccattcaggacagcacggaggatcaggtggtgttcaaccagtctgaggtgcccatcgtgaccggcgagatcctgaacgccctgcgcaccaccggcaagaccctgtgcgtggtgggcgacggctacaccatgaacgtttccggcaaaaacgtaaagagcaccaccagcgagatcgacaccgccatcacctttaccgagagtgaagaggggctggagtttgagttggacaacggccgtgcccttccctgcgcggtgcagctggagctggatgtgagcacctactcccgcctgtacctgtacaacaccatcagcaacaagtggcagtacctgaacagctacaaggacggcgtgatcaccgccgacactgccggccgctacctgctgaccaaccagaacctgcggttcggcaatatcaactggtccttcttcatcgccggcggcgtggttgtgatcctgatcgccgtggtctacatcgcgttcaagaaacgctactggttctggtaagcgcccctgctcttcccgcatataacaagccgcccgctgcacaccatttcgtgcagcgggcggttttttgttctattctcccctgttactccaccgttacgctcttggcaaggttgcggggcttatccacgtcgcagccgcgcagcaccgccatgtagtaggcgaacagctgcaagggcacgatgagctgcagcggcatcaggatgtcgtcgtactcgtccaagcggatgacctcggtggcaacgccctccggcacttccgcgtccttggtggtgaacagcagcacccgtgcgccgcggctgcgggtctccttggcgttggagatggtcttttcgtagacgtttttctgggtcgccagcgcgatgaccggcacaccgtccgtgatcaggctgatggtgccgtgcttcagctcgcctgcggcgtaggcatccgagtgcacatagctgatctccttcagcttcaggctgccctccagcgaaagggcgtagtcgaacccacgcccgatgaaaaagcagctctgggtgttcacatagcggctggcaaggtacttgatctgctcgcagtccgcaaggcggggcttgatgacctcggatgcgtgcagcagctgggcggtgtagtatttggtcttttcctcggtcagctgcccgcgcgcgtaggccaagcgcagggcaaacaggtacagcacgcacagctgcaccatataggccttggtggacgccaccgcgatctcgggcccggcgtaggtgtacatgacgtaatccgccgcccgggcgatgctgctgcccaccacgttcacgatggcaagcaccggcacgccccggctcttagccagcttgagggcagccagcgtatcgctggtctcgccggactggctgatgatgatgaccagatcctccggcttcaggatggggtcgcggtagcggaactcgctggcgatatccacctctgcaggcacccgcgccagcgcttcgatggcggtcttgcccaccataccggcgtgcatggctgtgccgcagcccaccagatgcactgtgccgatgctgcgcagcttttcgtccgtcagttccgggatgcgcagctccggcagaccgttctccacccgggggctgaccgttgccgtgatggcggcgggctcctcgttgatctccttgagcataaagtgggggtagccgcccttttcggctgcttccatgtcccagtctgcggtcagcttttcgcgctctaccgcctcgccgaactcgttatagaagcggatgccctgtgccgtgcacaccgccatgtccccttcttccagcacgctgtagctgcgggtgtacttgagcagcgccgggatatccgatgccacaaagttttcgccctcgccccagcccacgatgagcgggctttcccgcttgaccgcaaagatggtgtccgggtagtccttgaacagcaccgccagcgcgtagctgccccgcaccttggcaagcgcagcctgcaaagcctgcagcggctcgccctgatagcagctgtcgatgagctttaccagcacctcggtgtcggtctcgctggtaaaggtgtagcctttggcgacaaggcgctccttcaaagcgccgtagttttcaataatgccgttgtgcacgatgctgacccggggcgtggagtgcgggtggctgttcacatcgctgggctcgccgtgggtcgcccagcgggtatgaccgatgccgcagccgctctggggcagcgccagctcttccagtttgctgcgcagggtggagagccgccccttgcttttgaccacgcggatgccgtcccgctgggtaagcgccacaccggcagaatcgtacccgcggtactccagcttttccaaaccgtccagcagcacctgctgggcgctgcgcatcccgacataacctacaatgccacacatacaaaatacctccagaccgactgcggcgcgccgaaatgcgctgctgcacagtcagtttcctctatcaaagtctatgttcttgtatggctttctttgcagggttctgttccggtattgctgccggtttttgccctgttctgcggctggtatagccctcagccggagaaacatccgccgaatctttcgatgatccctctcctcgtcaccctcacggctgtcacccgtgtggcccggcgctttgcgtcagcttgcggtacacattccttctttcaatgttttttgctcaatgcattcccagcattttatgcagtttgggctgccacttcagcttgtacagcagcagcagattgcacagggcgcggtcgtaaagagcaaacgccacgttgcccatacccagtgtgagcagggtcattgccagtgcggtggtgcgcagctcctgcgaaatgctgcccgccggcaccagcaccagcagcaggccgtacatcgccagcaccgccccgttgcacagcagcagcttgcacaccagctgcaatgcccgggggcggatgcggtcgaaccggggctttaccagcgggtaatagcccagcagcacggtgaagatcagagcgatctctttatccggcacaaagagcagccccagcagactgacggcggcgtacgccgtccacgccatggtgatgccgcactccatgcacaccgttgcaatgagaaagcttgccaccgccggtgcgatgaacatggcaatggggatgatggtgcccagcagcatcagtgccacgcacagtgccgctgccatgccgcagtacgccatggaccagcttttgcttcttcgcttcttcatgggatctcccacttttcggtatctacatcctgctccagcgggtagaccgcgtgttgcagacctaagatcatgatattgttcagcagggtgtcgtttagcttgaggtccagcatcttgtatgcccgcatcaggtcgttgaccgcagccagtgcctgccgccgggcgttctctatggcagcagcctgcccgttgagctcgttgaccacgaacacgttgtactggccgttgcggcggtcggcttcaaagcgctcggccttatccagcagatagaagatgcggccgatgcagctgccgatataccgcatactcttgcgctggttggggtcgtccgtagccagcgtggagtacaaagcgccgtagacgttgctcataggttcagcggcaagggcgtagtttttggcgctcaggttcatctgcaccaccgcctgctcccgctcctgcgcaaacagccgctccagtgccgggttctcctgccgggctttctcgtaggcgcggcgcagcaacagcttgtccgctgcgcagcgcaaacgcttgaccgggcgcagctcgctgtacttgcggtcctgcagattatgccagcccatcaggatctccgtctgcgccgcctgccggatgcccagcgtctggcacatcatgctgcgccggaacggcgtgccgggcatccgctgccgtttgcaggtgggcatacgccccgccagactgtcggacaggatggcaaacagcaccccgttggtgcgcagcagatggcaggcgtagaagccgtaggacttatacatctgccgccgcaccccgcggaggtaacgcatataggtgttgtaatcccggatcgtcagttccggcagatagggccgcatccgtcccttcatataagccagccatcctttctgtacagtttttgtatcctgcggtcaataaggttagtataatcctttttgttcggcaacgcaactgccggatgcaaaaactgccgtaatttgtcattatgccgaattttgtgaaatctatttttctattaaaaacacccgcagaccgtctcttttcagcaaaagatgatctgcgggtgtttgtgccggattttcccggaaaaagacacactttttcagtgcaatgtctgccgggcgggcagtcaaatgaccttacttcttttcaaaatgggtgcgcttgccgtcaaagccggatttgggcatgggctttgccatcttttcggtcttgggggcgttatagtacatatacagctggcaggggatcatgccgttgtacatcttgcggcgcttgttggcgcgcttgccgtagtgcagttcaaagtccatatcggcggtaatggcgtacagcccggcgcaggggctggcttccatctgctgtcccagcgtgcgcgccagcttggcagcgccctcaatggtgcccagacgctcaccgtagggagggttcgtcagtacgatggcttccggctttgcggcaaaggtggcaacatccgccacctcaaagtggcagcggttctccacacccgccagcttggcgttggcgttggcctgtgccacggcggcggggtcgatatcgtagccgtaagcttcaaagcccacgtccagcttggactctgccagtgccttctggcgctgctctgcccacagggcagcgggcacaaagctgtagcgctcggcggcaaagcggcgtttcagacccggggcaatgttcatggccttctgcgcggcttcgatcagcaaggtgccgctgccgcagaaggggtcctccactaggctgtcgcggcgcacacggccaaggtcggcgatggtcgccgccagcgtctcgcgcagaggggcttccatggcgttgcggcggtagccgcgcttgtgcagaccctcgccggtggtgtccagcatgatctcgcacacatttttgcgcagcataaagcgcaccttgtactccacgccgctctcgggcagcacggtggtgcggtgacccttcatcaggcgcttgaccaccgcctttttgatgacgctctggcaggcggggatgctggtcagctggctgttcagggaagagccggtgaccgggaaggcagcatccgcaggcagaaactcctcccacgggatggaatacacgccgtcgaacagctcgtcaaaggtggtggccttgtagcgtgccagcagcagcatcacacgctccacggtgcgcaggttgaggtttgcggcagcgatcatctctgccccgccgcagaagctcagacggccatcctccacccggatgttctctgcgccgatgcgggtcagctcaaatttagcggtggattcgcacccgaaaaagcagggcgcgatcagttcaaattttgcgggcatggtagttcctttctgttcagtcccgaaaaaacagacctgtccgaccggggacaggcctgcctgtgttccttgtgatcccagccgatgcgatggctcagcggccgcggcggctgcggggcgcataaccgccgccccggcggttgttggtctcgtggtcgagatccgccattttctcctcgctctggctcttgaagcggctcatcatgtcctcaaagctcaggttgtcggagcggacgggtgtcttgggctgccacacgcggggagccgcctcccgggcagggcctctgccgccttcacggagggcacggcctgcaccgcgcccgccggagcgtccaccctcctgcccattgcggaagccgcccggacgggggcctgcggggcggccctcccggggctgacgcggagccgggggcagcagccgcttgatggacagtgcgatcttgccgtccggtgcaatgttgatgacctgcaccttaacttcatcgccatcgtgcagcacagtgttgatatcctgcacgaactcgttggatacctcggaaatgtggaccatgccgacacgcccctccggcagcgctacaaatgcgccaaagggctttacaccggtcacgcggccttcgaatacgttccctacctcaattgccaaaactcaatactccttgttttccaaaactcttgacctgccgcgcggtcagttgccggtcacatccacaaagatgcgctcgttgggtgcggcgtagttgtaagagtcgcgtgcgacccattcggtgatctggtcggcatcgccgctcagtacgcgctgcagttcctgattttccgtctgttgctgcgccacctgttcattcagtgtttccagttctgcccgcttggagctgatggtgacctgattggagatataagccgccagcatactcagcaaaagcagcacaaaaaacaggcggaacgccatggtgaccactgcattctttctgcgctttttgcgtcccgtattcgtcattgccttacgctcctgtctgaacagcagaccttctgcgtctgttctcttactttgatacgtttgaattatacaacaatgcccgctggtttggcaagttctttttggatttttttgcggttctttccgcgttccggcgtaatttgcgggcagttttcgccgcagcgcggcggcggcgcacaggctgcaccgcaaaacggtgcaaaacagccccgatcccccgccccagcgcccgcagcgggatgcccagcaccccggcagtgcaaagggcagcggcaaaggctgccgccgccatgtaccaccgcagcaccccggcggtgctgtacccggcggcgtagctctggcacaccagcagcaccgcaccggaaagcagcacgtccggcgcaaaagccgccctgccccgcaccggcaaaaacgcccgcgccgcgccaagggcagcgcccagcacggcacaggcggcggcttcctgcaaaagccgggcgggcagcagcacctgcaccatcagcgcagcagccggtgccagaagcccccggctgcgcgggcggcggtatactccagcccgtcgaaccgcccggtcagctttgcttccccggcttccagatccagtgtctgcatactgatctgcgcaccggacaggtgcagaatgcccttgccggtctccagcgcggcgctttcggcgctgcaatgcagcacccgctgcaccccggtgacggtcagcctgctgcggctttctaaaatcaggtcatggggcagcggcggctttgcggcagctttttccataggcagtccccctctgccagcattgtatgcgggccgggcgggcggttattccgcgatcacctcgtacatctcgcgggcaacgtccttggtgcggggctcttcatccgagagcacccgcaccttgatgggacggttgccgaaggtgacctcgatgatgtccccggcgttgacggcctgactggccttggccaccttgccgttgatgaggatgcggcctgcatccgccacctcgtttgccacggtgcggcgcttgatgaggcgggagaccttgagatatttatccagacgcattggcgttattcctttcctttcagcaaaaaagccgccgcaccttgtgcaggcagcggcggcgtgacagaaccgattacagggtgtccttcagggacttgccgggcttgaacacgatgctgcgggaagcagcgatggtgatgggctcgcgggtgcgggggttgatgccctgacgctcggcgcgctcgcgcacctcaaaggtgccgaagccggagatgctgatcttttcgccctcggtcatggccttgcccagtgcctcaaaaacggcgttaacagcctgctcggcgctcttcttgctcatttcggtgtttgccgcaacctgtgcgatcaagtcggtcttggtcatattatttgcctccatctgatttttgtcttaaattctctcgttctatcggagcaggtcattcgacctgagtaccgcgttgttcctgttccagacactgctgtgcaaagcgcttggatgcaaaggtcagtgcttcctctgcatccacccccgcaagccgggcggcgtttaccgctgcaaacagcagccggcctgcggcttcctgctttgcggcggcgtctgccgtggcaaagtcctgcacggcggcttccagccggtgctgtgctgcggctgcatcctgctgcccaaggccatgcccggcggcacgcttttgcagcttttgcgcccgcatgagtgcgggcagcgtagcgggcacggtggccagctcgtcggcaagggtggtgcgccccttttccttatttttgagcgcatcccagccatttataccggcgttttccgctgcggaggatgcaaagatgttggggtgccggaacaccagcttttcgcagacattgcggcacacatcctcaaaggtaaagcgttcccgctcttcctctatggcggcgtggaacaccacctgcatcagcacgtctcccagctcctcccggagcagcacggcgtcgtctgcatcaatggcttccagcgcttcgcaggtctcttccagaaaatttttgcggatggaagcatgggtctgcaccttatcccacggacagccgttttccgggtcccgcaggatgcggatcacctgcagcagctgctccgctgtatagggcggctgtggggtccagtccagcacacgttccatctccttttgaaaagatactgtaaattgtaccgcagctgctgcggtttttcaagcaaaaaaccgcaattttccagcatttttcatggttttctgcgcttttcacaaaaacaggacggcatcctgcgggggataccgccctgttgcagttttttcctgttttcagcttacagctgtgcgccgcacttattgcagaacagcgcatcgtccgagacgggcgcgccgcactgcgggcaggtcttgcgggcaggctgggcgggctgttccggggcagcttcttcctcctccacgggggcttcgtagtccacctcggcggcttctgccggggtcagggtagccttcaggcgggtgatctcctgctcgatggtatcgatcatctcgatgtatttatccaccagcggctggttttcttccttgcccttggcaaggctgtacaccagtgcgcccagctgacgctgtgccttgagcagcttgccctgttcgttgaccagcagcgcctgcgtcttgcccttttcagccagatccatggcggcgttcttgcccttttcggcatattccaaacccattgctttgatcttgttaaaatccataatagacacctctcttattctggcagtatattctctgcagatggcggcgcatcctgcgccataccggagtcgtatcctcattatagcgcagcgttatggcaattgcaacgaatgcaccgcaatttttacagtttggtgctggtttggaaacaaattttacgcatttttcaccggttaggtgcggctgccgtagaactcgcgcagcatactgtcggcgggcagcagctccagcggcagcgggtccacctgctcaaagcggcgggcggtctcgtcccacagctcggcgttgtggccttccagcgtgaactgacggcgcacctcgcccagcagccgggagatcagtcccagctcgtaggtaaaggaggtgtccagcaaaaagtctgcggtggtcttgaagcccttgatataccgcgtttcgccgtccagcaccctgtcccacatggaaagggtcttggcggggctgcggccacgggctgcggcgtcccgcagggtgcggcggcacaggcggatatcctgcgtattgatgacccggcgcccgtcgatgcagtattcctcccgcagcccggcgtagatgcggtagatctggtcgtccggcacaaggccggtcagctccgggttcagggcatggatgccctccacgatgcacacaccgccctgcaggtcgatgggctccaccgcggcagcgcgctgctcggcggcaaaatcatagatgggcagctcggtcttgccggtctcgctgagctggcgcaggcactgcttgatgaggggcagatccagcgtttcaaggttttcatagtccagcgtgccgtccggcattttggggtagtaggcagcacctttaaagaagttgtccagactgaccacctgtgccggggtgccctgctgcaccagcgcctttgccagacagtgggcgctggtggtcttgccgctggccgaagggccggtcagcataacgatctttgccccggagccgcgcaccttctgggcggcatactgcacccgccgggcgtagctgttctcgctcagctgcgccagcgcctgcgggctgcgggctgctacgttatagaggtctacttcaaccagtcgtttcggtacccagatcgtgatcataaaactcagccactccttttttccgttccagtacctccgcaaagcgctggatatactcgttcggatacttaaaattgaagatgcgctgcatccgtttgcccccatcggccaccagtttggtgctgccgcccgcacccgccgagaggatggtctggacttcctccatgatatagatattatagtaaccctcgtgacccggcttgcaccagcccacgttttccagattctgcagcgtgttcttctgccggtagaggtaataggggcggtagcccgcttcagccagcagatggcatttttccagcatagcggctacgtccgcgtagtcgttctccttctgatcctcgatgactatgcgggacgcccgcttgagggtaagggtgtggacggtgatattctccggctgcagggcaatcgcctgccgcaggctgtgctcaaagccctccaccgtatccccgggcagaccggcgatgagatccatgttgatgtcctcgtgcccggcgcggcgggcatcggcgtagcaatccagaatatcctgtgccgagtgcttacggccgatgtttgccagcaccgcgtccgagaaggtctgggggttgatggagatgcgggtagcgccgtattccttgatgaccgccagcttttcagcgtcggtgcagtccgggcgacctgcctccacggtatattctacgaccttagccaggtcaaaattctcccgcacagtgcccataagctgccgcagctgggcggcagaaaggctggtgggcgtgccgccgccgatgtagatgctgcacaaggtcagcccagcacgctcggcctgcacccggatctctgcaacctctttgcacaggcagtccacatagggctgcaccatcttgcggtcgcggtccagattgcagctgacaaagctgcaatagctgcaccgggaggggcagaacgggatgccgatatacaggctgtaggtcttgggggcgctgcccagccgcagaatgggctcctgcaggtcagcgatttccttcgccatttcgtatttttgctccgagcagtcgaaccgctgcaaaaagaagcggtcgatctgttctgcgctccacccggcggcgcgcttgtcgtggataagccgcaccgggcgcacaccggtcattttgccccaaggcgggcggatgcccgtccactggcgcagcaggtcataggtcaggctggcaagggcaaactccggggtttcgccgccctgctccaccggcagcggcagcggagcttccagcgttttgctcttttctccctgccgcaccagcacccgcagaccggtatcggtcttttcagcccacagacagtcctcggcaggctccggcggggtcagggtcaggggtgccatggggtaaaacaggcgggcaagatgctccacctcgtacccggagggcagcccagtgatatagatcttcatgtcgttctctctttaaaaaatgtcgttgccgccgcgcagggcgctgcggatatagtagttgttgtccagctccgcgccaaaggtggaaaactcgccgtggccgggcagcacctgtgtttcgcgggggatgggcagctgtgccagcttgcgcaggctgtctgccatctgtgcgctgctgccgccctcaaggtcggtgcggccgatgctgcccgcaaacagcgtatcaccgcagaacaggtgctcgccgcacagcagcaccacgctgccgggggtgtggccgggggtgtgccacgcggtaaagcgcagctcgtccaccgcgatctgctccccttccgtgtagccgcagtccacagcggaaagcgggtacatcctgtccccggcaaggtctgccttttcacagtagagggtggcgttccactccgccttcagggcggcggcgctgcccacatggtcgtagtgaccgtgggtgcacaggatggtggtaagggtagcgttgtgctgctttaaaatttcatcgtagctgtgcacctctgccgccgggtcgatgaccacggcatggcctgcatcggagatgagcagaaaggtgttggtatacagcggcggtgccgcaggaatgtgaaaaccttgcatggttactccttctttttccactcgtcggtatcaatgatgatggtgcaggggccctcgttcaccagcgacacctgcatatgcgcgccgaactcaccgtgctgcacgtccttcaggccgtgcttcgccatctcggcaaggaacagctcgtaggcatccaccgagaggggcggctttgcagccttgataaagctgggacggtagccctttctggtatcgccgtaaagggtgaactggctgaccaccagcgcggaatagcccagatcccgggcgctcaggttcagcttgccctcggcatccgggaaaatgcgcagacccgcgcatttatcggcaagtttgggcacgatgtccagcgtgtcggtgtccctgacccccagcaggatcatgatgcccggcccgatggcgcggggctcgccgccttccacccgcacgctggcggaggatacggcctgaataactgctcgcattgcgttaactccttgtcaccttgagcacgtcccgcaccttggaaaggcgcgccaccacacggttgaggtgctcggtattgttgatgccgatggtcaggctgaccacggcgcagttgttttctacctgacgggcgttcatggcatagatgggcacccggatatccgccagtgcgctgagcacgtcctgcagcagctcgttgcggttcagggcaatgatctccagcccggccttgtagctgtccttcacgctgtctgcccagtatgccttgacccagcggggggcgttggagggatccttcatgctggcaacggcgttggcgcaggtctgcttgtggatggaaacgccgaagccccgggtgataaagcccacgatggggtcgccgggcagcgggctgcagcacttggcaaacttgatgggagtgttatcaaagccctccaccaccacgccgtcggtggcgtgcacacggctcaggtctaccttgggcagatcctccaccgacttattctcctcggcttcggctgccttgagcttctgccactcttccttgagcttgggcaggcagttggcaatggtcatgccgccgtagccgatggcggcgtacagctcctcggcgttgttctggcgcatccggcgggagcagccgtcgataaaggcatccagctggtcgtccgggatgaggatcatctcccggcgcagctccttggacaaggcgtcccgtccctgctggatattctcttcccggcgcatcttcttgaaccagttgcggatcttgctcttggcttcgctggtgcgcacgatcttgagccagtcgcggctggggcctttatctgccgggcccagcagcacctcgatgatctcaccggtagccaccacatggtcgatgggcaccatgcggttgttcaccttgcagcccaccatgcggttgcccaccgccgaatggatggcgtaggcaaagtcgatgcaggtagcgccggtgggcaggttgatgacatcgcccttgggggtaaaggcgaacacctcctccggcagaaggtcgctcttcaagtcgtggagcaggttgccggaatcctcgctcaggcgctggttctccagcagctggctgacccatgccagacggtcgtccagcttatcgtggccttcgcggccctccttgtacttccagtgggcggcaacgccgtactcggcctgctcgtccattttgcgggtgcggatctgcacctcaaaggggatgccctcgtgcccgatgacggtagtgtgcaggctctggtagccgttgggcttgggggtggagatataatccttaaagcggttgggcagcgggtggtacatatcgtggatgagaccaagggtgctgtagcactcagccagagaatccagaatgactcgtaccgcgtagatatcgtagatctcgtcaaaggacttgttctgcatgatggtcttgcggtagatgccgtagatgctcttgacccggcgcttgatggtggcaccctcgatgccgctttccaccagacggcgctcaatgacgccggacaccttgatcaaaaactcctcaccggagcgctcgctgagcatccggctgatctcggagtagcccacagggtccagataatgcaggctgcgatcctccagctcctccttgacgttcaggatgccaaggcggttggcgatgggggcgtacacctccatggtttcgcgagccttatcgcggcgcttctgctccggccatgcatcgccggtgcgcatattgtgcagccggtcgcacagcttgatgatcatcacacgcacgtcccggctcatagccagcagcatcttgcgcaggttctcggcctgcaattcttcaatattggagaactggatcttggtcagcttggtcacgccgtccaccagcagcgccacttcctcgccaaaggcggctttcaggtcgtccagcgtggtgggggtatcctccactacgtcatgcagcagggcggcggcgatgctctcggagtccatgcccagatccagcaccagccgggcgactgccagcgggtggcagatatagggctcgccgctgcggcggcacacgccgttatgggcgttattggccagctcgtaggcctttttgatcatctccatattgtaggccttgccgctggcctgaatggcctcgcacagcttttcccacgttacgatctccgggcgcacctcagagggcagcgccccctccggtgcgtctgccagcagtgccgtagcagctacggtggcggtctcctgcaccggctggtgcagatgggtcttggcagagtagccgtcctcgtcccgtaccggagccgggaccggggcagtatttttctttccctcaggcatttatagttcctccagacatttcaggatgggggcatcgccaaggttctttttgcctgctgtcggcaccagctcccagaactttgccccgcctttttccgctgcggtgatcagccccacctgttccaaggcggcaactgccaccagcgttttgccggtctgctcctcgcccagctttgcgcacaggggctgcagatcctcggcgtgccagcggcgggactgcaattcccggtacacggcaatgatatccgtgcgtgcgggggcgatctgtttcttttgttcatcggtcaggggggtgccccggcgcagtgcctgcaccagtgcagcctgccgcgccagctctgcgcccagccctgccgggtgcaggtcgatgatgcggccggaaagctgcgcgccccgggcggactcgtagaccgaaagattcagcgctgcgtccaccacatcgcccaatgcgtagggcagctgctctgcgggcatcccgaaccagacggcatacaggcagctattgccctgccgcagccgcaggcggctgtgccgcccctccgataccgggtatacgccgtccaccacggcgctttgcagcaggaacaccggggtggggttctccgccccgtagggtgccagctgatccagatggcgcacgcattccaccgtgatacgatccagatggatggctacatcacaggtaaggggcggggtgtgcagcaccgggcactcccgggcagcccactcgttcaggcggcggcgcagctggggcaggttttcttcccggacggaaagtcccgccgccatggcgtgaccgccgtagcgcaccagaaggtcggcacaggagccgatgcaggcgtgcaggttgaagccctgcacactgcgcccgctgcccttgccctcgccgtgctcgtcgatggtgaccacgatgaccgggcgtccggtgcgttccaccagccgggacgccacgatgccgatgacgccgggatgccagtcccgtccccacagcagcatgatgcggtcgtccagccgctcgggctgctgttccagcagctcttcggcagctttgaagatctgctgctcggtctcctgccggtgggcattgatctcgttcagtttgtgcgccagttcctcggctctgtccgggtcctcacagagcaccagctgcaaagcggtaacggcgttatccatgcggcctgccgcgttgatgcggggcgcgatggcgtagctgatgttctcggcggtgatgggcttgcccgcaaggccgacttcctctaaaagtgccccaaagccggggcggtcggtctgctgcagctgccgcagacctgctttgactagagtgcggttctcccctaccagcggcatcacgtccgccaccgtgcccacagcggcaaggtcgccgcagtaatccagcatttcctccggcggacagccgtccagcgcggcgcagagcttgaaggctacgcccgcaccgcacagacccttgaaggggctgtggtcgtcctcccggcgggggtccaccacagccaccgccttgggcaaagtctccggcggcagatggtggtcggtgatgatcagatccatgcccagcgaggcggcaaactcggcttcctccacggcagagatgccgttatccaccgtcacgataagggtgcagcccttgttgtgcatggactggatggcgtttttagaaaggccgtagccgtccccctcgcggctgggcagcatacacttgacggtcgcgcccatgcccttgaggtgctggtacagcagggcggtggcggtcacgccgtccacatcgtaatcgccaaaaacagcgatggtctcgccattatcaatggcctgccagatgcgctgacaggcagcgtccatatcggtcagcagcgcggggtcggaaagttcttcctcccctgccagcaaggtcagcgcttcggcggggtcggtaatgccccgggcagcaaggatgcccgccagcagggcgttttccttctgttgagcagccagcacggccttatatttttcgtctgaccacggcgcttcgtccatggcctgctcttccagctgtgccgctgcctgctcggcaatggcggcggtcagttcccgcacagcggtgcggtccagcggtttttgttcccaagcgcggtaggtcattcaaattccctcccggtcaggccgtcgttggccagcattccctgcaaagcggcgatctcggaagaaatatccatggctacgtccgaaagcagattgttgtacaggttctcatacgcctgattcaaggtatgcaggatgcctgcgatatcccggcggatggtctcggcgttttcgccctgctgcccctgcacatcgttataggtgtgcagcagcttgagggtggtggggatataatattccgcaaaacggcgggtcttgggttggctttccgggtgtgcttccagccagtcgcagatggcggtagtggtcttatacatcgccgccagttcttcccgcgcctgcgcgtcctgcatgagctgctgctctttttccagcacggcagcaaagcggcgggcggtatcgagattgagctgaacatcgccggtttctgtctcttccggctgcggcggcacggcggcagcggcgaccgcttccttagcggcgcggtagtcctctgccgtcaggtagagcgtttcagtctcatcatccagccatgcgttcagccagccattatggatgtagctgcgcagctttttcagcgcttttttcttggtctggtgggtcaggtcggccagcatcgaaacaggcaggcccttatggtagtccacgctgtcggcgtagtcggcaaactggcccatctgtctgcccgccttcatccgggctgcaccacaggccgtcatccagccaaagcccgccgtggcaaggcccagcacgctgctgacgatgcccagcacgttgtaggcggtgttcataacatagtccgtgcccgtcatcaggatgccgccgccctcagtagccgacaccacaacgtcacccaaagcagccggcgaaatagtgcccagcccgataaggcagcccagcgtccccagcccgaagatcaccgcaaaggtgatgcccaccgccagcagggtgcggcctgcgctgtaccgttttttggcgctgatacggatactttccaccggggtaggctccggctttgcaaagatctgccggaaccagccgggcatcccggcgaggtcggcatccgcagcaccttcgtcagagggctgctttgcgtccccatagggataacctctgcgcccctgccggaaagcttttgcggcctccccgatgccgtagttggctgcatgaacagccgccttgcctacatcccacgcccggtcgccgatgtccatacccctgccctcgaagccgtgggcaaaggcatcggtcatggtgtcgccaaaggcgcgcagctggtcttccagctcctgctgcacctgccggccttcgttatttcggttatcgttttcacgattgtacatcaaaattttctcacccttctgccggtgcataccggctgatgatggcacgtgctacccgcaggccatctacggcagcgctcataatgccgcccgcatatcccgcaccctcgccgcaggggtaaagccctgccagctgggtgcacacaagatcctcttcccgcttgagccgcaccgggctgctggtgcgggtctcaaggccggtgaggatggcgtccggcgcggtgtagcccgcgatcttgcgctcgtaggcgcgcagacccgcccgcagggtgtccgccaattccccgggcagcagtgcgcccaggtctgcggcagtcacgccgcggtcgtaggtgggctgcacgctgccgatgcgcagctgcccgcgcccttccagaaagctttgcacgttctctgccggggcggcgtaagccccggcggcacgaccggcggcataggcttttgcttccagctcccgctgaaaggcgatggcgcggcgggggtcattggcaaaatctgccccgcctacgctgactaccaccgccgcgttggcgtttttgccgctgcgggcatggtagctcatgccgttggtcacaacgcgctcttcctcactggcggaagccaccacctgaccgccggggcacatacagaaggtgtacacgcaccggtcgccaacgtgctgggagagctggtactcgccccggggcagcgccggatgcccggcggcttcgtggtacaggcttttttcgatctcggtttgcaggtgctcggcgcggaaacccacgctgaaaggcttgcactccagcacaaggccgctgtccatcagcatactgaaggtatcccgtgccgagtgtcccactgcaaacaccagcgtctcgcaggcaaagctgccatttgtagtagtgatgcccacaagccggccgtttttgcgctccagcccggtaagggcggtgttgaagtgcacctcgccgcccagagactcgatctccctgcggatggaggtgatgacgccgcgcagcaggtcggtgcccacatggggcttttgcttccacgcgatctctgccggggcaccgtgctgcaaaaacacctcggtgacaaaatcacacagttcatccccgatgcgggtggtcagcttgccatccgagaaagtgcccgcgccgccctcgccgaactggatgttggcgttggggtccagctgaccggtggcggaaaagtgctccaccgcctgcacacgggcatccagcgcagggccgcgctccagcacgatggggcggtagccctgccgtgccagcagcagggcggcaaacagccccgccgggcccagtccgcacaccacagggcggtgcgcaagcggctgggtgcccgcgtgcagggtaaagtctgcccggcggtgcagggcggcgtccgggcagcgcgccgcaagggcggcttcctccccgggctgcctgagggtgaccgccacggtatacaccagcttgggctggccgtggcgggcatccaccgaaagctttgccacgccggtgtgctctaccttgctgcggggcacccgcagggtgtgcagcgccttttcaaatgcctgcggctctcctgcggagaggggcagacggatgttgcgaaccagaatcatttgttgtgttatccttttactttagttgctttcaatgcggcactgcagcacatagctgcccagtgcaaagatcttgccgttggagggcacatacagccggcaggcaatgttctgctggccggtagccacagcaaagtcctcggcgtcgatctcaatgaccacctgctcgggggtcaaagtttccatagcgcccttggggccgcagaggatcacgttcatcagccgctcggtctccaccgtcagctgataggtagcgggcaggttgatcacctgcacgcagctggcgggcaggttcatggtcttggtctccagcccggagcagtcaaagctgatcgtgatggtggagatattgtccagcagatagatatctgtcggcagctcaatgggcatctcgtacaccttgttcaggctgaaggtggaaaggtcgatggtgccgatggacaaggtggacagcgcatcgatcttttctgccgggcctgccaccttgagctgcttgcagctgagggcgtagctcagcaccgagttatcgaacccgcgcggcgcgttgataaagttcaccttcaccggcagggtcgccatcttgtacacctgcagcgtcacgtccacgctgctttcttccagcgtggtgtactggaacttgatctccttgccgccgctggtgtaaaagcgcaggggggtgtccagcgtgaccgactcggtcagctcgctgctgtaagacgcttcggcggtgcaggtagccaccttgctcagctcgctgctggggccggacagggtgacagtctccttggagacctcggtgctgtaaaggatatagccatccgcaatgcgcagatagttggtggtaacggtaacgggcagggtcttttcctccaccacgtcaaacaccacgtccaccgtgttgtcgctgccctccatggtcacggtcacgccgttgagcaggccgtttgcgccgcgcaccagcagccgcagggtcttttcgccgctgtcgcgcacgctggaccagtccgggtagaccacaaaatccgaggcgctgagcccgccgatggtgtagccgtcgccggagagcttcaggttcacggtcttatcctcggcgctgacgatgctcaggccccgggaggtgtaggcagcggaatcgtaggtgtaatccaccggcacattatagatggtattggtggtgccgggctggacgatgatagtgaccaccatccatgcaacgatggcgcccagcacggacagcgccagccggatgcggcggtcatccagaagattcttctttttgcggacggcaggctttgcgccgttcgtcttgttcggctggttgctcattgctgctcgtcctcccctttctggctgatccaggtccacagcttcttcgcctgctctgcccagctgtcggcggtgttcttttccaccgtggactccttggggatcatctcatcgatcaggcgggtatataggctctggcggtcaaaatgacggatcagcacaccattttttgccatagagatgatgccggtctcctcgctgaccacgatggcaatggcgtcggagttttccgcaatgccaaggcaggcgcggtggcgggtgcccatatccttgcccagatccagattgttggaaaggggcagcacacagcccgccgccttgatgcggccgttttcgatgatggcagcgccgtcatgcagcggggtgccctcatagaagatggtgcccagcacctccagattgaccgcgctgttcaccggggtgccggtgcgcacgatctcggaaaggttggtatggcgttccagcacgataagtgcgccggtcttggtctcggaaaagcgctcggcggcatcgcagatggcaatgatggcgctgcgccacgcgcccttcaggctggggtcgttgtagcgcccttttacgttgaacagcttggacgcccactgatcggtctgacccatgcgctccagcgcgcggcggatctccggctggaacagcaccacaagggtgagcagaccgacctgcagcagcgagttgagcagccatgtaacggtacgcatattcagggtatttgccaccagatacacgaccatgaccagcagcgcacccttggccagctgcccagcgcgggtgcggttgataatgcccagcagctggtagatcagaaacgcgatgatgatgatatccagcagatcgacaattttaaaggtctgaaaattggcgatgatcgcattcagtgtcatgagagtgtgtgcccccttacactgcttcgatcagggcaacagcgtgggcggcaatgcccagtccctcgccggtaaagcccagatgctcctccgtggtggcctttacgcttaccgcttccaccggcaggccgaaagccgccgccagattggcgcgcatggccgggatatggggtgcaagcttggggcgctggcacagcagggtggcgtcgatgttttcaatgcgccagccgtgctccttgaggatctgtgccacgcggcaggccagcttcaggctgtcggcaccggcgtactccgggtcattgtccgggaaatgctggccgatatcccccagcgccgctgcgcccagcacggcatccatcaccgcatgggtcagcacgtctgcgtccgaatggcccagcagacctttttcaaaggggatctccaccccgccaaggatcagcttgcgctgctctaccaaacgatgtacatcatagccgtgtccaatacgcatttcagtttccttcctttgtgccgggcggggcagatcctcccgggtggtgatcttcaggtttgcatagtcgccctgcgtcagctgcaccgggcgtccggtcagctcaaacaggctgcaatcatcggtaacaaggcgggcgcgggtctcgtccagctccgccagtgccgcaagatacgctgcacggtcaaagcactggggggtctgcaccgcatacaaggtgctgcggtccggggtcgtctgcaccgcgcagtccgggggcacagtcttgccatcgccccgggcagcggccttgatggtatccttcaccggcaccgccggggctgctgcgccgcaccgggcagcggcttccagcgccgccgtaatgaccgccgcgctcacaaaggggcgggcggcatcgtgcaccgccaccagttctccgtgcgctgccagcacaccgttttttgcgctctcggcgcgggtagccccgcccgctacgatctgcacaggctttaggcagtccgccgcctgctgcgccacaaaatcccggtttttgcccgccaccagcacaagctcggtgacctgcgggcactgggcaaaggcgcggatgctgcggtgcagcaccgtttcgccccccagatcaaaactgagcttatcaaagcccatgcgggtcgaggagcccgccgccaccaatactgccgatacagttttttccatctcttccacctaccctgctgctgtgccgcgctgcgcgcccacagctgcttataataaaccatgttttattatagcgtatcacagcgcaaacttcaaccgattttacacagcaaaagtgcatccgtgctgcataaagccctgcggtctgtcctgaaagggcagtcgcccagagtgtgcgctttcgccctctccctttggacttaactccctcagtcaaaacctgacggttttgacagctccctccgggagggagcctttggcataacggcacagtttccagctaaagtgcaaagtctttgaggacgtcaaagccccttgggggaagttttttgctccggtcaacgctccgacaaacgcaaaaagggctgctgcacaaaaacgtgcaacagccccgcggatgctttgggatagttttacttcaggatgggctcgatggcagcagccagagcgtccttctgtgcctgtgcttccgccagatccttgcccagcgtggtgaagtaggtcttgatcttcggctcggtgccggagggacgcaccaccacggtagcgccgttttccagcgtgtagatcagcacgttggcagcgggcaggccggtctcttccggcttcttgtaatcggtcaccttgaccaccttatggccggccagctccacagggggctggtcacgcagcttctgcatgatggaagccatcttctccatgccggtcaggccggggaactcgaagctgtccaccttgttcaggtagcggccgtactgggcgtagatctcttccagacgctgcttgatggaggagccgatgctgcggtagtaagcagccatctcgcagatgagcatggagccgatgacggcgtccttatcgcggacgtagggaccggccagatagccgtagctctcctcaaagccgaagatgaagcggtcgacctcaccggcagcctcgaggtttgcgatctgatcgccgatccacttaaagccggtcagcacattgcgcatctccacgccgtaatgctttgccacagcgtctgccagcggggtggacacgatggacttgactgccacggggttcttgggcatagtgcccttctcgatgcggcctgcgcagatgtagtccagcagcagaacgcccatctcgttgccggacaccagctcatagctgccgtccgggcacttcatggcaatgcccacgcggtcggcgtcggggtcggtagccagcatcaggtcggcaccggtcttggttgccagctccagacccagcttcagcgcctcgaagatctcggggttggggtaggagcaggtggtaaagtagccgttggggtactcctgctcgggcacaatggtgatatcggtgatgcccatatcgttgagcacatgggtcacgggcacaaggccggagccgttcagcgggctgtacaccagcttcaggccggcagtcttgcacagacccgggcgcacctgacgtgcttcgatggcatcgtacagcgcctttttgcagtcgtcgcccacaaagcggatcatgccgttctccacgccctcggcgaaggagatgtactttgcaccggtgagcacatcggtcttctggatctcgtcatagacgatggcggcggcgtcatcggtcatctggcagccgtccgggccgtaggccttgtagccgttgtacttggccgggttgtgggaggcggtgaccatgataccggcgttgcagttatagtaacgggtagcaaagctcagcgcgggcacaggcatcagggcatcatagatgcgcaccttgataccgttggctgccagaacgccagcggcggtcttggcaaagacatcgctcttcaggcggctgtcgtagctgatcgccacggtctgggtaccgccctgggtcagcacccagtttgccagaccctgcgttgcctgacggacaacgtagatgttcatgcggttggtgccggcacccagcacgccgcgcagacctgcggtgccaaacttcagcgccacagcaaagcgatccttgatctcatcgtcattgccttcgacctttgccagctccggcttcaggtctgcatcttccagatccgctgccagccagcgcttatattcatccagatacatcttgtacaccttacctttgtttaaaatcttttccccggattgaaacggtttgtgtaaacctacttatactataaactcttgctccgcttatgtcaattgcgtaaaatggccgaagtttgtgcccttaaaaccgacaaataccacaaaaaaccggttcttctgccatattcattgcgtttttgatgtatccagcagctggtagggctggtgcacatcctccagcacctccagccactgctccggccccacgccattttcgcacaggtagcgcagcagccgcattatccggccaaagctgtctgccggagcaagtactgtgctgctgcgcaccctgccgccctgctcccggcgcagctgtgccagcaccccctgtggggtggaagcggcacagtacaccagcgtgcaggcgtgctgcagcccctccagctctgaataggtacggatataccggcagcattccccatttgtcatgatctctcgttctcctttctgctgcattgacaactttcctgtgctttactataatgatttcaaacagaaaaaactgtcgaagcatagtagatatatccattattttccacttttggcatttttgacaaaccatgcgccatgcagggagggacaccatgtattctgtgaccaacagctttggcctgaacggactgcgcggctttgccgttgcggtggaagccgatgtttccggcgggctgcccgcgttttccatcgtaggtctgccggactctgccgtgcgggaaagcgccgaccgggtgcgcgctgccatcaaaaaccttggcttccgcttccccgaccggcgcatcaccatcaaccttgctcctgccgatgtgcgcaagaccggcccggtgtacgatctgccgttgcttttggcgctgctgaccgccagcggacagctggaagaagtgcccgccgacgccgcctttctgggcgagcttgcgctggacggcagtctgcgtccggtgtccggcgtgctgcccatggcgcttgccgctgccgagtacggcatccgggcgctgtacgtcccggcagagaacgccgccgaagcagccgaagcctgcgccgacaccatgaccgtctaccctgcccacaccgcccgggaggtggtggaagcgctgaagggcacccgtcccctctcccctgccgccgccatcccctttgacccggaggacgcatggcagcaggtgccggattttgcggacgtgatgggacagtcgctggcgcggcgcgccatggtcattgcagccgcaggcgggcacaacgtgcttttgacgggcgcacccggcaccggcaaatccatgctggcaaagcgcctgccgggcatcctgccgcccctgacccgggaggaagcagtggagacgaccaagatctactccatcgccgggcagctgccgcagggacgcgggctgatctctgcccgccccttccgcagcccgcaccactcggcaagcgctgccgcccttgccggcggcggggcgcagttccgcccgggcgagtgcagtcttgccaactgcggggtgctgtttttggacgaactgccggagttttcccgcgagagcttggaggtgctgcgccagccgctggaggatgggcagatcaccgtgagccgcgccgccggaagcgccacctaccccagccgcttccagctggtagccgccatgaacccctgcaaatgcggctattacggccaccccacccgcgcctgcacctgctcgcccagcgcggtgcggcagtaccgcagccgggtgtccggcccgcttttggaccgcatcgacctgtgcgtggagatggaccccatcgcctttgacgagctgcacgccgccgcaccctccgagagcagcgcggagctgcgcaaacaggtgcttgctgcccgcgccattcaggccaagcgctacgccgcgccgggctttaagggggtgcactgcaacgcccagctgaacgccgggcaggtgcggcgcatctgccgcatgacccccggtgccgagcagctgctgcgcagctcctacgatgcactggggctttctgcccgggcgcacgaccgcattttgcgggtagcccgcaccgtggccgaccttgccggtaaacccctgctggacgaggactccctgctggaagcgctgcagtaccgggcgcaggaaaaattggacggataatacagcacatcaaaaacgcgagtggccgaaacggtcgctcgcgtttttgtttgctatcgggaggtgcattttctcttttcaggtgccgcccggtgtggtatactggaaatgcaaaaaccagaaaatggaagggataaagtacaaatgaacattcgtaaagccgaggaaaaagacattcccagactgcttgcgctgctggggcaggtgctgcagatccacgcagagatacgcccggatatttttattcccggcaccacaaaatacaccgtctgtgaactggcagcgcttttgaagcaggaggataagcccatctacgttgccgtgaacgaggaggatgtgtgcatgggctatgccttctgtcagctgaaggagcagcctttttccaccaacatggtgcccttcaagtcgctgttcattgatgacctttgcgttgacaagcagacgcgcggacagcacatcggggaaagtctgtttgactatgtaaagcagcaggcaaaagcactgggctgctacgaggtgaccctgaacgtctgggcgggaaacacttcggcagagcacttttacgaaaaaatgggcatgaagaccaaggagcggcagatggagtatattctgtaattcgggcgagcgcgccttatttcggatgtccaagtgggaaaatagggttactgtccagtatgtttactgcgccaagctatagaagaaaaggcatcgcaagagaattgctttcccgggtgataaatgatgcaaaagaatacggatgcggagttatccaaataacagcatccgatatgggaataaagctgtactccaattttgggtttgttcacaatagcaattttatgcaatataaattataaggtcgcacggcaccaaacgcttctgcccccggtcaaacaggtctttcggaacaataaccggaattgcatccggcacaacgatatcccggaaagacagttcgccaatgtaccggcgattcttcagcatggtgttcacgctgctgtgggtcatttttccgcccagcatattgcggactcccttgtcgttgagaaagtttacgatctccaccattttatcaccgttgtcataccgctgaaaggcttccagcaccagcggagcggtcagcgggtcaagatgataaaacttgtcctcgtcgattttatagccgatggttcccgtaacgccggtgcactttcctttcagaacgttctcggtctgaccacggatcaccttttcggacagttctgccgaatagtattctgccataccttccagaagggtttccaccagaatgccctgtgaaccctcggcaatgggctccataacggaaatcaggtggacgccgttctttttcaggatcatcttgtaatttgcgctatcaaaacggtttcgggcaaagcggtcaaatttccagacgagaacaatatcaaacagcttcttaccgctgtctttaatcatctgctggaactccgggcgattgtctgttttggcagagaatgcacggtcaatgtagtgcttgatgaccgtaatgccgttcttttccgcataggccgtgcattcccgaatctgcccttcaatggattcttcgcgctggttgtccgatgaatagcgggcatagattacggcggtcatagactcacttcctttttctcagagggccagggattcgagttccctcgagcgcaccaaaatcccacgaagaatcgtaagattcctcgtgggattttcctttttctggggctctgcacacttttgcacactttttgcacaccggcgggaaagccgtgtttttccttgcattgtctgcattctgtgcatcgtgagcgttttttccatacttttttcaggcgaacagcaggcgggtgaactcacgccgctgctcggggttcatctgtcggacaactttcagcatcccttccggggtgatctggatgctgtccggcagattttcttttaccggcacagagccggatttgggggagccgatgtcctgtgaatagaagtctgcttccagcttctcagccagctccaaccggggcttgtcctgcgtgtgggcgtaggtgtccatcaggatgccggtggtggcgtgaccggtgttgccctgcacggctttaatgttgccgccggattcaattaactggtaagtggcactggagtggcgcagaccgtggaacacgatcttctcaaactccgggtgctctgcacgccaagtgcggtaccatttagaaagggcttccggggcaacaggcataccgttgggcaggcggaagagctggccacagttgcgatatctgccatccatggcaagctcgtcctgacggagcttttccagccaagccagcagttcctctttcaagggtttcgtcagataaagggtgcggctggatttcttggttttcggcttcttcagcaccagtgcggagctgctgccctcacgctggtcggggaagatgtggtagatctgattcgggtcggtcttttccagtgcagccttttcggtgcgctgtaagctcctgccgaccgtgatggtcccacgtccatccgctgcatcaaagtcgatgtctcccggctgcaagccaaggatctctccgacacgcagcgagagaatcatgctcagatgaacagcaaggtggagcgtagggtcggtcatggtctgcaacgcagcaagcatggtcttttcgtcccagatggcacgttcttccgaggtcgatttcggggcttctctcggaatcggtgacttgaggagcagaccccactcaacggcataggaaaaagcagtcttgagcatggcatggacttcccggatggaagcacccgtcagaaactgccgcttctgtttgtcggtgagcgtttgcttgacaccctgcttatacagtccgcgcggtgtccggctcaaagtggcgtagaactgttcgaggtcatacgtctgaaccttctgaatctgcttcttgccgagatagggcatgacaagattctgaatcatggctaccgtgtgggtgtaggttttgggtgcccacttgtgcttgctggactggatggggagccacttgtacagcatttccgctaccgtcattgcatcgggtatgaggaacgtaccgtccaagagttctttctctaccgagatcttgcggtcttgcgcttccttcttggttttgaaactctcccagccttcacagatccggccagcatggtctttgtatttgaaacgaacggagtaggaatctccgcgcctgagaatagatgccatagatgttccctccctcagaccgctgcaaaccaatcatcgaagctctgcttgcttacccggatactggtaccaaggcggatcaccttgaagtctttcgtggtgttgcacagattgtacgcagcacggttggagatcgccaacagttgggcgatctcctccacccggtaaacgagcggggcgtgtcggacggttttgctggtctggtcagaaggttctacggcaggggtttcggacaatttcattgtaggggattcgggcgcgattttcaagtcctcacgggtcagtttagcggaatttttgcggacattcgtcataggcatgtctcctttgcacttctccagacccagtgcagctccggttgaactgcaccctcgtgggctggtaaatatgtaagggcctgccgctcctgacccgaagcagcagcccaaaaaaagtgcgagaacttgaatttacgcgccccacgcgccccaaaccacacaaaagtacctttctgtgttgatttttcagggcgcatggcttggggatacgcgccctattggggcgcgtcttggttcatctcgcgccccgaagggcgttttgccgccccacatccgcccggaaggggcggacacgcgcccggagaaagcaacgataacaagtcaaaaccactgatttggggcgcgtagggcgggagattttcacttttcgtgtgttttatgccgcagcaaaggcggggtggacgcatacgccccggaagccgcggtactttccctcgatgtgcttggaaaaggtcaggccatacttccctgcatttttcagcaggaactggctgaacttcttttgcggaacaggcgattccagattatcctcgcaccacttggtgtaggcgcggtagagataggtggagcgttcctcggtgtcgggcttgaagcggacatacgccgttgcctgcatgaactgggtcaggttgtcgctgtccgccatggctgcttcgaggttctggatggagcgctcgctgatggtgaactgatagcggttcgccagcagacggtgcaacccttccagcatccacagcaggatgccgggacgctcctcggacaactcttcgatgaggaagggattatccacccgggcagggtcacggtctttcaccgtgatgaggatctgtctgcgccagaagccgtcgctgtcatcgtgagcagccacaaggttgccattgccgaagcagatgaaacgaacgtacagcagaccttggacagcctgcttattctttcgctcaatgcacaaacggtcttcagcggtgacgatggacttgatgttccgggtttcgggcaaagccaccatgtttaggtcgtcatcgaccatgaccaacttgtactccagatttgcactggcaaagcggttcgtttcgatgcggaggatggattcggagtgagaggcttccccgaacagcttcttcagcagcaagccgatgcgggatttgccctcgccgcccttgccggtcatgaccagcatcttctgcgccttggtagacgggatcaggagatagccgagatattcctgcaaggtcagaatgtcctccgggatcagcagaccgtccagaaattccagccacttggtcggtgcgggggcatcgggctggtattccacggggagccggttcaggcagagttccttttccggcacaaatccccgctcgtccagaaagtaggtcccgttctggagatggatgcggtcaagctggggtttccattcaggggtataggtttcgatacggagtgcgtccagaacctgcttctccttcttggcaaggttgtcgagcacaaagtcacggaggtcgctgtggacttcgtagagcagtgcatcctcgtctacctcgccgttctggtcgaacagcttctgtttcaggcacatcatggggtgtttctctaaaaggtactggcagtaagcggtttcacgcactttgcccttactgtctacccaagggcattcgcattcttcctcttcttccagttcgtcctcatcacgccaatcgtcgttcctctttttccagtcgctcatgcaatccctcccaatacttccgtagctcgttttcggtctgcgggtccgggagcaccgaacagtccagataatattcaacgatgtcaaggttctttatcgcttcaaggaagcaggggtgaagttcttctgtgggtgactgcggtgcatatcggacccgccaacgctgcagacagcggtaatagtccagcagctgctgccggacggtgggcggtctgcggggagcaagccgcaccttgccgtcggcaagtgccatgccgaagtcctccttcaacttttccacggccttgtagggagaaagttgaaaaagtctgccgacaaaatcgatcacatcgccatccgcctgacaggcgaaacagtggaaacggttgtccaccttcatgctggggtgtttatccccgtggaagggacagcatatcatgccgttccggtttacggcgaagccgtatagctccgctgcctgccgggtcgagatggcgttttttacatccgaaaagacagaggtgctaccctccgtcccaatgggtggggtacaggcgaaaggacgaagccctgtgaggggcgtgggtgaggttgggtttattcacacatcgatccgtcagagtgttgttcatttgacctcctgctgcggtacggcgtggctgcgctcttccttgcggaagaaggcttccacgttctgttgtgcggtgcggagttcacgcagttcgatctgcgctttcttgtagcgggtgtagaacccgtttttctccgaggaaagggtctgatattcggcatccagctttttgaggtccggcagcgtcctgagcccattggccttgaaataggcgcaagcggcctcgtacacggcaaactctgcacggtgctgctccttgaacttggcgggattccgcacagtctggagcctctgtgcaaggggcttgtactgccgatagaccacaagatgcccgcgcagctccttgagggagaccatgcgggcatccaagtctttgaccaccgccagtgcatcgtcgtgctgagttttcagttcggcaatgcgctggctcaaggcatcttcgctgagcagctttttctcctgcaggagacacaaagtttgcgaccagcgtttgaggttgaactttttcgcccaacgctcatagccgatgcccttacctgcggcaactttcgcctgaatgtcaaccagtttcctgatcttatccggtttcttctcgctgctgggctggatgatggcagtaagctggatgttctgggagagggcggtcagcacctgctctttttccagcttcttgctcagtttcttggcggtgatgaattttgtccggccgggcgggcagtagctcaaccggcctcggctctccttcacggcgatgccgtgttcctgcatgagcaatgcagaaaattcctcgaaggtggtggtcttgttcagcacagcgtagatctgctttcgcagcttgtccagctcggtctggtagacggtctgggtgggctgctgcccttcggcggcgagtttggcgttggcatggtcgaggcggcgttgtccgcgccgctgcgcccaatactcgcgctccgaaacatggtcgccttgggcttccagcaggttgatctggttcaggtcggcttgctcgcacatctccatgactgcgacacggaggtgccggagcatggcagaggtgcagcggtgcttcttgcccgcttcccagtcgcacggcttgtccatgaagggctgccgttccacggtgcggacacgcaagctgccgatgacgatgtgaacgtgaatgttccctgcactgttgtgaccgtccgggtgggtgcagacgatggcgggatgaccggggaaattttccttgcagaactgcaagccaagggcttgcgcccgttccatggtcagaccgttctctactgcgtccttcgggtcgaagctcacaatgtagtggtgggtcttcacgtcctcccgcccgccgttcttgccgtacttgcgattggcaatcaggcaggccatagcgaacgaggattcgccgcactcaagggtgtcgagcaggtacgaatcccgcagcttgggtctgcccttctcgtccagaatgggcaggccggtgtactcgttgtgctgaaaggtgagatagctttcggcggcggcatagttagagttcttcgagcttaaatgcttgatggttgccatacagttcaccaaccgtttcttcggctttcagccgaaagttcgtgagtgcggacagttcctccagaatttgcgcccggagctgctcggtgtctttgccgccggagttgaagtgccgtgcaagctggttgaggttgcttcctaccttgctgcactgggcagacaaggcagcaagcgccgccagtgcatcctcgccgccctgcgccaccacaacggtgtgcttgacattcacgccgtacaggacgcggcggacgagttcggattgggtgaggtggagttctttgcaggcgtatgcgatccgcagtttttcttctgcggtcactcggactttgatgatgtgtgtctttcgttttcgcggcgtgtcattgcggttcttctttgcgtgtacgttcggacttttcatttcagccatattcgacctcctgtgaaaatgataaatgcccgctccgggatggagagggctatgtaatgcgacacgccgcttttgcgctgaaaccagcgcaatgctggagcagggtttggggaaggcactccccaacaagtggcagaccatgtgacagaacattttcaagtattgaaaatttgtggccacaggtcgatacttgctttcgccctttccgtgcaacactgaaaatttcagaagtcgaaccgcaatgcacgttgaaaattttgcagagcaaaacgtgtgaaaaggcaaagcccctgctcatggtcaccgttcacaccgaacgcagttcctgcccctgttttgcagcggcgttgtccggctcgcccacagaaagcgtgaggtcatggcgcagtatctcgttcagacggcttatgtaggattcaaggtacagtatgaagaaagccggacgcagtgcggacactacaacctgcttctttcaagcacaagaataacactttgcggttgtgcagtcaacaactaaaaacaaattttggaagattgaacaactacataagattttatttgtgaaaaagaaaaataccgcccacgcagcgcagcgatgattttgtcgggtgaaacggcggcaaaatagatcgggtgtgttgcggggcggtaaaaatcttcatggggaataaatcctcgccgctctgtacttttctacaaatttggtgggatttgcgataaagggtatcatggattgcggagcgcgtcaagatggttttgcaaattttattgcagtaaagcagtgatagtaggacttatgcatgggatatgctattttgacaggcactgatttgaaaaattgagataaaacaaaaagcgcagagcaccttattcagagtgctctgcgcttttctgcatcttgcgccattgttgcggggtcatgccgtacttttgccggaacagttcgtagaagtgggtgcggttggtaaatttgagttgtagggcaatctcgctgacggaaagtgttgtttcccgcaaaagccgttcagccttctggaaacagaaggtcatgccgtaatcgaaaagacacagaccggtgcggcgctggacgatggaattgaggtagctgccattgtaattcaaaagccgtgccagttcgctgcgaggcagccgaccatctgtatcttccagcaaacggctgatacgcagaaagagcaggctttcggggctgctgctcaggtgcaccggggtgacatagaacccggacgacagaaaatcgaacagttcgcaaagtgcgcccttcaaataataggtggcggcggcactgggttcgtgcaggatgtgggtcatgcgggcggtgagcgttaccagggtttgaatgctatcggtgttttccggtgtggggaaaaggtcctgatattcctttcggaggtcttgtcccagatttgccagcatgaactgcaaaacgggattttccggcagatggcgctcggcttcaaataattgcagggatgcagattccgtcaggctgcggacaaaatccacagacagaccaagaaaacagagcttggcggggccaatgaagcgttcgttatggaggatgctgcggtttaccagacaacaggttccggcacggtaggggtattctttttcctcaatctgttggatgacctccccttccaacaccagcatcagttcaaaataatcgtggcggtgcagcggacgggagctgagggcacggaataaagcatccatagagttttcatgcagccagcagccattcggtgagaacatctgaatgctgtattggtcggtttctcccagaccggtacaggactccagtgtgatctgtaccggggacatgatcttgtagaaggtagagagctgactgccccagttttcaacctccaaaatattctcatagctggtggaatccggtttcatgaaagagtctcctttttcgcaatgtgcgaatatgatacaatctgatggatgcggcacacgatgctgtcattgtggaatgtgaacggaattgctaaaatataggcacaatacaaaaacattctgtaaaagctgtgcggccgatggctttattatagagtgcttttgaaaaaatgtaaagcgacagacgcattctgtcgccgtgaatgatacagcacatcttgaaaggagaatccccatgtctgctactgcaacgacagagaaaaaatatctgaaatggtatcagaagctggcctacggttccggcgatctggcctctaactgctcctatggtctggtttccagctttgtactgctttatctgaccggaacactgggtctggacagcgccatcattggctctttgatgctggcttccaaggttctggacggcatcagcgatgtgatctttggcaccctgatcgaccgcacccactccaagctgggcaaggcacgtccgtggatgctgtttggtcaggtaggtgtttccctctgcctgtttttgctgtttgccatcccggctggcagcaccaccatgcagtatatctacttcttcatcgtgtacacggcactgaacgcagtgttctatactgccaacggcattgcctattcctctctggtggcactgatcaccaagaacaacaatgagcgtgtgcagctgggctccttccgttttatgtttgcggtcgtcaccaacatctttatgggttttgccgttaccggcatggtggagaagttcggcagcggtgccgcaggctggcgtaccacggctctgatcttcgcgatcgttggtttggtggtcaacaccatcagctgccttgcagttaaagagctgccggaggaagaactgagcggcaacaccagcgaagccgcagaggaaggcaaagcagttgctgaggagaaaaagcatggctttgccgagaccgctaagatcctcgtccacaacaagtattacctgatgatccttgccatctacatcgtgtactatatcatgagcaacctgaccaccggtgccggtgtgttctgcgccacctattactggggcgatggcagcctgctgggtcagttctccatgatgaagatgttccctgttatcatcgcactggccattgcgcctgtcctcatcaaaaagaccggcagtatgcagaaggtcaacttctggggctacgccatcagcagcgtgctgggcatccccatgatctactttgccatgcagaagaatctctccatgttcctgctgttcatgttcatcaagggcatctttgcaggtaccctcagcggctctctgaatgccctaatcgctgaggccagcggctacaccacacgcaccaccggcatccacatggacggtatgatgtacagctgctcctctctgggcgtgaaggtcggcggcggtatcggtactgcggctgtgggttggctgctgaagctgggcggctttgtgggcaccgcaacggtccagagcgaaagcgccattcggatgatcttcaacctgtacatcaccttccccttcgtgatcggcatcattattacagtgctgctggctttccttgatgtggaaaaggccaataagaagtgggatgctgaacaccagaaagaggcacaggcatgattcgacagaatttcaacgcagattggacggtagaaaagggcgatggcaattcccggatgaattcctttctgggaaatacccagacccaaaccgtgcatctgccctacgatgccatgatccacgaagcccgcaccccggacacgaaaaatggtgcgcagaccggcttctaccccggcggtgagtacatttttcagaagcatttcaccgcaccccaggcgtggcagggcaagccggtgtcgctggtgtttgagggcgtgtaccagacggcgctggtctacctgaacggctggctgctgacccggaatgtgaacggctatgcggagtttaccgtggaggctgatccctacctgaaatatggtgccgacaacctgctgaaggtcattgcagacaacagtctggaacccaacagccgctggtataccggcagcggtatctaccgcccggtgcggctgctggtgggcaacaaggtctatctgccgcaggataccgtgcgtatcaccacgcgggaggtgggcgagggctttgccctagtggatgtgacggcgcaggtgcagtctgccagcgccgttacagaacgggtgaccctgcagcagaccatctgccgggagggcatggcagtgctcaccgaccggcagaacctcctgctccagcccggtgaaagcagaattgtctccttccggtactgcgtggacagcccggctctgtggagcccggagaaccccaacctctacaccagcaccatgcaggtgctggagggcgaggaagaactggaccgggaagaaaccagcttcggcatccgtaccctgagcatcgatgcatcgcatggggtacgcatcaacgggcagaccgtcaagctgcggggtgcctgcatccaccacgacaacggcattcttggtgcagctaccctgcccgatgccgaggagcgccgcattcgtcaactaaaggaagctggcttcaacgccatccgctcctcccatcacccggcagggcgggcgctgctggatgcctgtgaccggtatggtgtgctggtcatggacgaactgagcgacgtatggaacgtgcggaaaaatccctacgactatgccctgtactttgagcaagactggaagcccaccattcaaaagatggtggccaaggattacaaccatcccagtgtcattttgtactgtgtgggcaacgagatctccgaggctggctcggaaagcggagcggagaccaaccgtcggctctgcaacaccttccgggagctggaccccacccgttacaccaccaacgccctcaacggccttatggcagccggttaccgcctgcgggagatcatgggggatgtgatgcgaaaattcccggcgcagcccggtccctccggcggcgatggcggcggcagcaatgccctgaacagctttatgagcctgatgtccggggaaaagggcgactactttgccacccatccgctgctgactgaggcgctgtccggctgcgaggattcctgcgatgtgatcggtctgaactaccttaccggacgccatgtgctggagcatgaactgcacccccacaaggcagtgctaggcaccgagacttacccagcagacatcgtgcggctgtggcgcatcgtggaggagaatcctcacatgattggcgacttcacatgggctggctacgattatctgggggaggcaggctgcggcatcttccattacgatggtggtgccaacttcagcagcatttacccggaacgcaccgcctacattggagatctggatctgctgggcaaccgccgtcccatcagctatctgcgggagatcgtttacggtctgcggaaggcaccctatctggcagtgctgcgaatggaacacaacggtcagacctccagcaaaacgccttggatgttcaaggataacctttccagttggacatggcccggttttgagggacagacggcttcggtggatgtgtactccgcctcggaggaggtggagctgttcctgaacggagcttctcttgggcgtcgtgccatggtggattttaccgccacctacagtgtgccctacactcccggcgagctgaaggctgtgggctataccggcggtgtgtgtgacggcgagttcacgttgcgcaccgcacaggatgcacagatgacccttacagccgaccgtaagaccctgcaagccaacagcgaggatgccgcctttgtgatgatccaattcgtggatgcaaatggtaccgcagatctgcacaccaagcacaccctgaaggtggagttggagggtgtaggcattctggaagccgtaggcagcgcaaacccctgctccgaggagcgttacgacaccccggaaagcgagacctttgacggctgctgtatggcggtgatccgcgcaggagaagctgcgggcgaaattcatctgaccgtcacagcagatgacagcgttcagaagcagctgacgatcctgattcaggaagcagagtgctgaagctcaaaaagccggtgaaggctcagaacaaaaacagggtgcgccctgcgaacgcaccctgaaagatccatatatcacaagagaaatagggcgttccccatcggggacgctctgtttctctttgcgggggtaagatgagacgattccatccgctgtgcaggaaacacctgcgttgttgctccagcaggcaggaatgtcaatcttccagcctgccgtggtcacagccaagcgacagataacgttccatccttccacccagcacaagctgagcgtactccaagggcttattgtagagcagccagtccagctctgcccgctgtgccggggtgctgccgtactcgtcctccacggcgacgcagtcgatggcaagagtggtgccatcctcgaaccgggcttccacttggttggtgtccatattgaagcggcaggaaagtagtttgttcatggtgaacctcatttctatatcaaacggtgtctgttcggatgtcctaaaccctgccataaaaccagtggttgatttgtccattgggctttgttttgcccgtctgcacatttttgcacactttttgcacacctgaatagctggataacggttgcaaagcattacactgtatgcaagcaatgcggtgtgtgcaaaggcgtgttttgcgatgatacgataaaaacaacgtttcttcgaacttttgaaatttgacgaatgatgcaccttggattctttttcttatcgaacagacgggtagctttttgcatacttgtagatctgccgtgcacagtcaaggctcattttgctggaatcgttgtgtttgagccatgcatttacgttcccggggtttagtttcaagtccgtgtaaagacgataattcgtcagatgcttcttctgctgaatctctaccaccctgcgatggatcaactctttcgtgtcattgtctgcaaggacggcatcccgcaccgaacaatagctgcgccagactttcagatagccttctggcagttcaggtgactgtttttccagaagcagtcgcatttgcgccagcgaatagcgattggaaatctgctcatattccgcagcaacagtgttgtttacggtatagcgaagcaacaaatctactttatcaaaggtcagcgcatagaggaacagcggttctttcaggcggggattttctgccatgcaatctgccagtttatggacacttgccgtctgcaccccggaaagctctgccacatactgcttcaagaagccctcaaatgtcagctttcgcatggtctccacctctccacatactcctgatagcggatataaaaatcccgataccgccagtcgttcaagatgctggctctcaactcatcctcatccgttgcaaggtgttccaatacattccaatccaaggagttccgcacagcctcactctctacgtctgccttatcggtatcgcggaaagagcacagctttgcaatcaccaaatcttccagactgggtgtgtagaactgcacctttgtaccaccaaagggcagcgactggagccggtcttggaagttgtacggaaaattgtcgatgtaggcttccacatcggtgttaatgtcgtacttgccgagcaaactgtatagttctttcggaacactcaaggcatcaatgtcatgggtggcgcgggtcagcttgcccaacaaaatgaacgcactgccgcctacgatcaccatctgatagcggccttattgtcgatcatcaggtcagcgtcttcgtccagacgttccagacgcttgcggaggtcatctaagatcatctttcccataaagcagtctttcgtatttttaataatagtattttctaaaatcattttacgagaaagagaacctattgtcaagagcaattgttgatttcaattggtattccaagaaatggcgattcccatgtccatattcatcgcctcacatcgaacatccatccagtttttcaagtctttaagtgcatttttccaatactcaaattctggctgctcacttatattccttttccaactaacttctagtccattttctttgaattcaagcttaacatctttcagtacatctctgggtgtaggatagtaaatctcatcatttaatttttttgcaaatcttttagcaggttcaatcgtgtctaataagcacagcataaactgcaacggatacttttggattgacaacttattctcgccgtgtttcaaatacaaaagtgggctcaaaccgtatgcctgatataattccgtatccatttcgccgcccatccatatattatgacaaataatcgcatctgccgcataagcagcatgggacagttgctcgatgtgccatttaaggtttccggcttcttctataaaacccttctttatgatttttttatttcggctgtatcttaaaaagttctttacaaatctatcgaaaaataaatatccagctaagataccatgttcgcaggagcccttgttcgcacggtaataaaaataattttttatcaaattttccgagaatctttgcggtgtccgtagttttcgatagggaaaattcccgtaaggggaatatacaacatcgagttctccaagataatattccaagtctttttgccgttctgttggattttctggtatgcgaatattttcaacgcaacttgcaacatcgtgatataaagcagtcaggtaccatgtgtaaagaaaatcataatttttatcgttatctttcacattataccatttatcatactctggtaaaaaagttctcagttgcctttccaaactattttttatcaacgagttttcctctataaacgctgttcccaacaaataaagtaataccgtgtgcaagtgttttccattacctaaatatgactccctgaaatcaaaatccaaaagtccatctttttgtccttttacaaagcagtcatttataaaatctttgcattttttatcttcatctccatctgtccaaaaatcaggagtgttgatttcatagtataatcgattaatcctaccatatattcttaaaagactatgctcagatgcattttctatacacatattttagctccttgtagtcctgtacggtatacttaccattctgatatgtttcgcacaactctgttgccctttttagctgaacactaagttcttgatcaatttcgtacaaagacatatcttttcttattacatttaatcttgtgccatcaagaatcgtttgaattttctcaacaacttctttatttatctttctactttcattacaaaaagtttcgcccagttttaggcatccaacactttccagtagctttatcagcaattcagctcgcctttgtccgcaagcatttacaatgattatatccttgcactcttttagctgcgttacttgagttgcatagtagttctgaatctttatacgtaaagcatcaactttttcttctaaattataatttactacaatcgaaacaagccaacctataaaacatttgaaaggttgacttcccactgtagcataaaacagcccatctttcccccacagatctatatatttttccgaattcaaaaaagtcccctcaaataatccaaacagcaccgtcaacaacaacacctcaacaacaatattttgctgtggtttctttattttaaggattgacattgcgaagctgattccaataactgaaagcaagcatccaacaagtggtactatttggattccatcgccgaacattaccaaaagttctatccatacagataagcccactaggacaaccgccaaaacgcccatcactataaatatcattgttaaaacaatcattctcgatctcctataacaacgctcatatcatctatcgaaccattttccacagcctgctctatcagccttttacaaaacaccatcttatcgtctgccacacaataaatatcttccatttcatcaatgcttacatggtcgtggataccatccgatgtgacaatcagcatatcctgtcccgaaacatcaatctgcttcaatttcagcaaagccggattgtctgcgccaaaacaagctgtgatttcatttttacgctcaaaagattccgctgtgaaagagttcagttgtccggttgccagcaagtattccatcgtagtatcatcccgtgtcagttgcttcaggtattttccgttgactatcgcatatactcgtgtattgcccacataggtaatttttgcagaatcctctgtaaaatccaccaaagtcaacgttgtcgccatgccagcaagcgcatcatctgtccgcgagcgttcaatcagctttcgattgatctccgtcaggtcttccatcgtgtggtcacattttcccagttcctccgcaacgaattgggatgccaccgccccggcattatttccaccaacaccatctgcaaccgccacaaaaccctctgtgcattcacattcacgtatgcccatagacagaatgttctgattcaaaaccactctgtcctcattccgggctttctgcacacctttctgggttgccgcatagattttcatcgtttcacctcaggaacatttcaactctggcggcagagcatccgctcggatctcatcaattttcagggtggcatccccaaagatctcgtggtcgaaaagatagcgtgccagcgggttgatcaggaagttttcgacaatattgccaatgccacggccaccgtttgacaggtttgccagcgccttttcttccagcgtctgataggctgcatccgacaaggacaccgtaatgcgcttttcgctttgaagattacggatgatcttgtccacctgcgatttcagaatacgaactgcaacttccggacggatataatcgaacacaacgatattttcgccgatgcggttcaaaatctctgggcggcccaaatccagtttgaaataattctcgatagcctcccggacacgcacagacatctcctgatatggcatatcgctggtcacattggcttctcgtgtaccgtctgcaccacgcgtataaatgccaagattgctggtgaaaatgataatcgtttccgaaaaatagacagtattcccctgtccatccgtcatgcggccatcttccagaatctgaaggaacttatccagaatcgaggggtgtgctttttcgatttcgtcaaacagcaggatagagaaggggtcctttttgactgcatttgtgagctgaccacctgcttcatagccaacatagcccggaggcgcaccgagcagtttctggtcgctatggctctgggaatattcgctcatgtcaaaacgaatgcagcagctctcgtccccgaacagaagttctgccaacgttttggctgtttctgttttgcccgtgccggtaggacctgcataaaacaggacacccttcgggcggctgtgcgatgagccctgcaagccggacattccggtgatagcacgcttgataacatccagcgttttggagatggcatagtcctgccctttcacacgggcttcaaaagtcgtttttgcatttttgatttcttccaactgcaaggtcttccaaggattttccttgatgccatacttatacaggtcgataacatcgcacatatcccgcaccgcaatgcgttcatttttgcaaagcctacgcagaccgttgatttccgtgaagctgaaaccatctgtcagcgccacaaatcgatcctgaatcttttccagttcctccgggtgtgcggcataatactctttttctgcctcgtaaacatcctttgcaaagaagctggggaagtttgcacccttcaccagtgcttcgcgttcttctctggatgggtatgcaactgtaatcgttttgacattgggattttgcagatagaaccacgccgggagatcgttcgttttgttcacgatcaacaccagcagatttttcaggatgctgccgctttctgtccgcacatcctttgcttccaaagacgcttgtagcaacagggtaaaactgtccacttcactctggtccatattatccggtttcacgatataccgggatgcaaagttcatgataataacagatgcttcccgattctgggtcagtgcggagtaggcaagatccgaagcagtgttattcctgcccttaaaagtgcacttgactgtatgattatcgacaggggcattcaccagctttgcaaaggctttggtatattcttcctcgcagttattataaaaaccccgcagactatcgtaaaagataatattctggtatccggaatccttgaaaaagaaatgcaaatactccgaaaggcgcaaaatgctccccttcggggtacttccttcctgcggatactggtaagaatccagcacatcgccctctaaaattagcaacggctttatttttgaaaaaatctcaagttctttgtgccattttgaaatatagtcactcattttgattcctcgtaattatttatccctatgttcaatcacaatattgtccggcaattcttttggacacattgaatttcccagaagaatcacttttgtctttctggtcgcaggccgaatacccgcaaatgcgttatattcaatgatagaaacactttcaggaatcactatttcttctaaccttgtcgccgcaaaagcataccttccaatatatcgcagcccttcttttagttcaaccttcttcaaatgggagcattctgaaaagcaatcgttaggaatttttcttatactttgtggaattatcacttctcttaacccagtcaaagaaaaactgtattcgcccatttcttttatgccctctgggatgcttatgtgttccaactggtgacatccgctaaacgctttcctcttaatgtactgaatcgtaccaggcaaatatactctctttatatctttccctataaatgcacgttctccaatccctacaacattctggccttgtattattttggggattctcacttcttctgcatttgtctttcctatatatgaaacgatttcaattcccaacgctatatttctatatgtgaattgattttcaggtgtatagtttacttctttatttgaaatttctcgcatagaaattccggtttctttcagtatcttagcatctaaaactgttttttcttcttctgcccgtttgagtttttcttgttgtgctaaaacattcacttttgtattttctgatgtatcattcaccagtcgcatcaatgaaatcattcgttgctgacatttaatgtacacaccaatctcattagacttgttcatatccgcaacaattgaaagtgtttcttccaatttctgaattttgtcctttagcagccgattttctttttggagttgttctaactcatccatgcatatccaccttaattatttttgaactcactaagcggtcttgcttcttttccttgtacacgacaatctttctgaatttgacttcccggtaaacaataaataataatattttctggtattttcttcattgttgtctccattcctagaacagccaacgcaatttgatgatctcgtgaatatccaaaagcatcatcagcaatttctgttaccgactttggaacaaccaattctgatacttttgttgaaccaaacgcctcggactcaatagtttttaagttttcattcaacagtaccttttccaaaggtgtacatccacaaaatgcaccatcgcttagaatcattattttttcaggaagaaccacatttttcacgcctgtatccgcaaatgctcgcattccaattgttttcagcgattgaggaaagctcgctgtttctagttttttacatcctataaatgcgtaggcttttatatctgtcaaaccctctgggaagttaataaatttcagttgactacaagacacaaacgccgtctccccaatagacacaatacttttaggcaagtataccctttcaaaatcagttcttataaaagcatcttttcctatataaaccactggtttcccttgaattttttctggtatgacaagttctcctgatgtgttaaatccgttaaagcccagaatttcaattccttcaccgggtatcattcgatatgtaaactgttcctccaaattgcccatgatggatatattttgcatagaatcccggatggcttcctcaattctggcatccatagccgctttttctgtcgccagttgattgatgactttctgttgagcatccacattcagttttcgagtacctgccgccgcattgacgagcttgcttgcggccagtgcgcgctgacgctgagcgatatactgacccatctcaccggatttattcatgtctgcgagagtagcaagcgtttcttcaaaatacgtcatgcgatttttcagtgattcaatttcctgttggagcttttctaattcatccataggtgtgtaccttatacattcttaaattcactaagcggttttactggtattccttttaatcttgcctgattttgaaccttactgcctgccaagcaatatatagtagtacaacttgatggtctgaatggcatcaattcaaactcggtatctttaccaagtatagcaatattcaaatcttttgcatttctgaaatcatgataatcaaataccgccatttcaatttttttcatactatcgggaatgataatgttacacaaaccagaatcattaaaagcttccctttttattctttcaagcccatcattcagcacaaccgtctgtaactgtttacagtctttaaaacacttctccggtatttctttacattttgaaggtatttttatttgtcgaaggcctgttccagaaaagcatccaaaacagagttctttcaatgattctggcaaattagcaacagctaattgcttacattcccaaaatgcatttattccaatataatgaattccctctggcagaatcacttttttaaaggtcatttttgcaaatgcttctttaccaatacccacaaccggtttcccgtttatcttttgcggaagaagcaattcatctccggtttcaaacccattgaacccttgaatctccatgccaccgggaacatctcgatacgtaaactgctcggccaaatcatcttcagcaggcgtattctgtgcagatgctcggatagcctcatcaattttagcatccatagccgctttttctgccgccagttggtcaatgacttgctgctgggcatccgcattcaatttttgagtacctgccgccgcattgacgagtttgctagcagccaatgcccgctgacgctgagcgataaactgccccatctcgccagatttgttcatatcggcaagagtagcaaaggtatcttccagatatttcacacgcttttccagcacttcgatttttgctgtaagttcagtatattcgctcatgttgacctcctgcatcgttcaaaaagagaactcttttttatggattccgaccgacaccaccgtgtcgcccacagtaaagttttgaatctggttctgcccgttttccaaatagtttgtgtatttttttcttaactgcccctctaaaatcaggatattctgattgtctgacccacggagaaagcacccgttgtttcgctcctgaagataggggtcatcgatcaaaacagaaatcccagtcaaaacttttcctgccagttcatcgaatgtatagccggtatataccagaatatcggggctgatagttttaagttcctgaatcagcttcatgcaggcatcaaattgaaaaagtggatcaccgcctgtcagggtaaaaccgtccaccgggtagtggtccgcaattttatggatcatctgcatgatccgctcctgtgacacctgataccgcttctgaaactcccacagttccgggttgctgcatccttcgcagcgtctgggacagccgcagaaccagataccgatgcgctttccggggccaagcacttccaccgggtacagaattcgtgcaatatacatcagattttccttaccagaagatacgccgctagttcttgccgctttccatctttgcagaagccgcctaagccgacctcatcgccatctttaacctcaaccgtacttccaatttgctggtcattcacaaatgtcggattggtgctactcagattttccagataaagtttcccgtcctgcatataaaaacggcattgttttcggctcacatagctctttccagccagaaagcactgcagttcatgttctcgccctacaacgacctcgtcttccgtaatgtcgtatgcaaaggttccgtccagactggtcaaccgatacttttcctgcgctgcttccaactctgttggaaggatatccgaaatatcttctccgcaggcactgcacttgcgggcgttggatgggttttgtgccccgcaatcgcagatacggacaagtaccttcgacggttcttccaaaggcgaagtttctggtttcggttcatcatcttcgtccataatgcgaacccccatcaaatctgccgagcagttctcgcagtccatcagggaaggggcgtttttcgccccacaaaatggacaaatcttgaattttgacataatcgttttttactccttcaaataccgttccttaccttgccctatgccactgcgtctattatttgccttgaatgtatcaataggtgcagttgttttataatccgatacgttgatgatctgcgcatagtcttcggatggaggaagcagtgccatccgacttttcaaaaccacgcctttcgcttccagccgcttttcaatctctgagaaatcatcgcagaatgattccatagattcgcacagttgtttggcctctgccgcatccggcaagcggtcatccgtgtccaatccacccagttccatggtgattttgccgtcatcggcataggtcacgtttaccgccgttccatcctcgtaagcgtacaactcgttggtaaagtgccgtccgttctttttgtgcacctgacgctgaccgatcacatcataacccatttctgccatcacttcgtcaatgctctggctgatgtaggctcgttcatcgtcctctgcaagctgctgttggagcctctctatctctttttgcagcatttccagccctgcctgacagcagcgcgtttcttttggctcaacctctgcggacaaacacagcgcctcatagcaggctctggtctgtgagtacacctcaaaaatcctctcatacgtaacgatttctttttggcaatcggcaagcagcggcatcacagtaatagccgcaaagttcttcaagtgttcttcatcctgcaatttttccaaagcagatttcgcctgctctccccgtgcaaaaaggtcatctgagattttcgactgtgcatccagcactttggtcaacttggcgcaaatttttgctttcaggttttctgagctatcaacaattttttctaccggagcaggcgatacatcatttttcgcagagaacgcgtccgcaatgctggcaccaaaatagcatccaagtgcctcgtcattgtcttgcgccgcttgccggatcttctgttgaagcaacgcaatttccgcttgcctttgcttaatctgcgtgtagacaatcttcacatgagcagcatcctttgattccacgttctgagcaagcgcaacagcacttgtaaccgtttcttgcatttcctgaatcagccgctgcaaaccatgatcgtttccagtttttgcagtaagctcctttgcaacagcctgttcccgaccgaacgtgctgttttctttttgtatctgtccaagcgtatttttcacccagatacagttctcttttcgctcctgctcaattctgcgctgttcttcaatggctctccgctgggcagcggtcaatgtatatcttgatgatttcgggccagacattgcgttcaacttctttcaatgtagcagtattttttctggggaacatctaattttatatatcgctcttctagttctcttgccgatttgctggatggttcaagcagttgcaacaagtttataacgcttgattcgttattgctttctcgtgtaaccttatacttctcattttcctctgctgctttttctgccgccaaaattgcttgctccgcactaaacttaaattcttccgtaaaatccgcaaccgaaaaacgaatccttccgtattccatcgtatcatagcgataattgattcgatagttgtttctataccgaagatccatactgccatccttgcaagtatggagccaggtgtgccgttcctcacccttatcaatgcacttggaatccgttccaaccgcattgctcgaatagctttgagtctctaaattaaaataagctcgttcacggtcacgttgcacgttcactctaaagcagcttctttgcagcgcagtaacaaatcttccttccagtgtgaataccagaatcgttttagaaaagatgcaaaagcagtagtccatcaagtgtaacatcacaggttttgtttgagactggaaatatttcagctcaacgggcatcgacacctctgttaccgttttccaatcaagattttccatgttacgtactttctggcttttcccactctccacaatagagttgcgaatgtcttcaagttcttgagaagtggtttcattcagaacaatttttcgattatcctgcggcttctgtgcatccagcagttcttcctttagcgttctcagttcaggctctttctctttcaagtattcaagttttcgttcatctgtcacatatccattacagtacaaaatttcctgaattttgcttcttaactctataattttttgctcttgttcctccgcttcccgaatgtaagttttcacgcagaataccacttccgaatccacaagcggattgtcaatttctgttatactgggaacattacttttcgtcacttcatcctcaactgtatatcgttttacaatttctgaaatttcatcttgaatacgttttttgtgttctcgctctttttgctcttgcttctccttggatgtagttactgctgctttaactaagaatactacaactccaatgtcaaagacaatcgccagcaatgcacaaacccacgcaattccattgtcagccaaatcgccaaatagttccccagatagcaaaagaacctctccagccatcatcatcagtcctataataaatgacagacatcctgctcctgcttccaccttatgatatcctccacttatagcaacgtctttttccactgttcaatctcattgctcttaccctgtgcaatcaaccatgcctcaaactgcgggtcaagagaattatccataccgataatatttttgcagaacacatcgaacttatcaaaggaactcgtaagcagcgtattcatatgctctgccagcacatcgatagaatcaaactgtttaccagccagaacaaatccacggtctccagaaatcagataagccaacaaataataattaagcgccatcgttttggcatttgctttattcagccgcaccgaagattcaatggattccgcaccttttacctgtgcctcgctgaacttatgagctttcatatacgaagaaatcaaaccataagacagcatttcattccacacagggcattcatctacattgccactacgcagcttttccattaaatcgattccaaaaacattcagcgattcatacttctgatttttccagaaaaacgtgttcacgtctggagacattttgtacaaaagtttccagaatgcaacatcttcattttcgccgcgctttgttacactgtcctctgcgtccatgcaggcttctgcgatttccgggtcacaagccatgaaaaatccggtgagcaatccacgatagagctgctttttgccattgtcccaatcagaggctaatgcctgcaccagttctgttgtgtctgtgtacagttcacctcggaatttgtaagcagggatccgggccgtattagattcaatgttagcctcacccggaatcggctgatattttccactgcaccagttgcagacttcttcgtaagtccaacggcgattgggatttttcttgtcattgcggttggcaagatcactgtatgtcagtcctgcaatcaattctttcagtgctttcggcatctcatccgggaacggaatcttttggatggacatatactgtgtaatttcatcgtttgacatccccgcatacggagtgtgcccacagaacagctcgtagagcgtaatgccaagcgagtagtagtccgattcttccagaaaaacgctacggaatgtttctggtgcagaatattctggcgtcattccggttttggtaacaagcactgtcctgccatcgtcaatcacagagctgataccgaagtcaataatggcaacatcccgaccattatcaagccgcataatattggaaggcttcaaatccttatggatcacaccgattttgtgcagttctctcaatgcttcattgatgcaagggatcacagtttcccgtagctcttggtacgaaagccttttaccctgaaggcttccgttcttatagtacggcaaaatctctaccgtttttccatcgaccattccagtatcaatcatatgcgcaacatacggcgattggatttcctttaacgcctgcataacttcgcttttgattgcaacatctctgcggtaaatttttgcaacatacgatttttcttgatagttgcacaagtacaaatcagcttcacccgatataacatccagcggttccaccacagaatattttcccaacagcaactgttcctgcacatgtgcttcaatctcatgcgcctgcgcaagttctgaattgactaccgtttgcgatgccgtttcctctttctggcttgctaaattcggattgacttttgttaccgcattcaggattctggcaaaaggattgattttcgtttcattgcccattttggtttctcctctatctatcgtattcatctcactggattgaaaagcaatttttgttttgctttcattctaccacgttctgcatcacatctcaaattttgagcaaattattttcagctactgtaaagattcacaaatccgctgtgcagattttgtgatgctcgctaaagaatttgatgtagcataggcataatgtgttcacataagtcctactatcaccactttatcgcaataaatttcacaaaaccatcttgacgcaccttgcgaaacatgatattctctgtcacaaatcccactgattttgtggattggtttgaaaccatccacaagatgtggtcgtgttcattttgaacactgcctcaccgtggattatccctgaaagattaaccgccccgcaacacacccgattcattttgccgccgattcacccgacaaaatcatcgctatgctgcatgggcggtatttttcttttacgggaaacgcaccttgaaaatttcatgagccgaccgaacgtgataccgacttttcgtcaacgccgctgcacaaacaggggcaggaacttcgttcggagcaaacggcgatcaacatacacgagcagtggaactctctacttatttttgcgtcttaacaattcggaaacaattacccagaaacagttttgagcgcagcggtagagggcaagaaccgtcccgtggccacaaattttcaattcttgaaaattttctgtccattcgggacttcacttctgcaatgcgtctgcatttccgaagtgatcttgttggggtagcgcttgtcggggcaacgccccttcatctgctgtcgcagaccgcgctgccgcttaaaagccccaccggggctttcattgctgcgctgcgcttcgcaaacgcggtccaaccccaaaccctgctcatggttcgcaccttgcggtgcgaaagaacggcgtgtcgtgcttacataacttcaccgaggagttatcgaacagacaggaggtacaatgaccaaaacgaatgttcaatcgacccctagcaattcccagcaccacgacacgccgaacaacaaaacgcacgtcatcaagttccgtgtgacagcggaggaaaaaacgtcactggaactcacttgcaaactcctgaatctctccctctccactttcatccgccgagccattcacaacgtcaagatcgagaaaacggtcatcgttgccggcggcggagaagaaaccctgaccgctgtttccactttgcttgcccagtgcagcaaggtaggcggcaacctcaaccagcttgcaaggcacttcaactctggcggtgcggacaccgagcagatccgggcgaaactccttgacgaacttgcagacctgactgcattccggctcagcgccgagaaagttctgggtgaactgtatggcaacgctcaagcatatcgcctctaaaaactcggactacaccgccatcgaagcgtacctcgtttaccagcacgatgaattttccggcaaggtaattctggacgaacaaggccgccccatgctgcgggattcgtacatcctcgatacacttgagtgtggcgatttttcctttgcaacggcctgtctgctggcaaaccgcaagtatggtaagaatacccagcatggtgatatcaaaagccaccagtatatcatcagctttgaccccagagatgcagccgacaacggcttgaccatggaaaaggcacaggcacttggtctgaaattctgcgaagaaaacttccccggtcatcccgccatcgtctgcacccacccggatgggcacaaccattcgggaaacatccacgtccacatcgtgatcggcagcgtccgaacacgagaggtggagcgcaagccctatatgcagaagccccgcgactggctagagggcatgaagcactccagcaccgcccagaccatgcggcacttgcgtgtcgaggtcatggagctgtgcgagggtgccggactgtaccagatcgacctgctcaacggctcgaaagagcgcgtgagcgaagcggagtattgggcgcgcaggcgcggccagttgaaacttgaccgtgaaaacgcagctcttaccgcagctggacagcagccccggcagaagaagtttgaaaccgtaaaagataccctgcggaaacagatttcttcagtgctataccgtgctaccagctttgaagatttctctgacaagctcatgcagcagtatggcatcacggtcaaggaaagccgtggacagctcagctatctgccctctggcagaacgaagttcatccgggcaagacatctcggtgacaagttcgataaggcagcagtgcttgccacgttgccggcaaacgccgaacgcaaacctaaggtgcagttcaaacaggataccatcgggaaactgatcgacatccagtcgaggatgaccgagggcaagggcatcggctataaacgttggctcacgaaacacaatctcaaagttatggcacagaccgtgaatcttctgcaggaaaagggcttgaccgacgaggacgctctaaaccagcgcatcaccgaactggaaaccaagtatcacgacgcactggcggtggtgaaagacctcgaatatcgcatgaaggccaacaaagaactgcgctatcacatcgcagcctacgccagcaccaagggtatcgtacagcagttcaatactgccaagcgacccgcagcctttgaggaacagcatcgtgcagagctgacagcgtaccgggcggcagcagcctatttcaaggcaaacaacctcaccaagctgcccagcccgaaaaagctggaagccgagtatgcgcagctggcatccgaaaaggcaaagttctacgaacagtacaaggaagccaaggaagaactgttcaagctgaaaaccgcaaagcagaatgttgcgtcctttttccgggaggaagaacagacgcagcaggagagataaaggagtgtgcgtatgatcaatctgaaaatcgatccggagttccagtcccagattccccctctgaccgatgatgaatttaagcagcttgaagaaaatatcctgaaagagggcaagctgatttctcctttgattgtctggggtaatacccttgttgacggccacaatcgttatgaaatcgttcaggagcatcccgaaatctctttctccaccatgccgctcccgtttgaaagcagagaagaagtcctcgcatggatctgcaagaatcagctggggcggcgtaatctcacgccggagcagaagaagttcctcattggaaagcagtacagtgtggagcatcgaaagcccggcggaaacggcaacaaccagcacacggctgctgccaagacaaccgccccggaggaattgtgtcaaattgacacaattcctcccacctctgcggaagcgagcatccgcaagcagattgcggagcggaacaatgtcagcgaatcctacgttgcccgttctgaaaagttcatgcgcggcgtagagatcatggaacagatggtgcccggtatgcaggagaaaatcctgtccgggcaattcaaagtccgtgatgccgatatgtaccgcctcgctagagctgattttccgaaccgcaagcagatcgtgcacgagattctgcacccggaagaccgtcccgctccgcagtcgagctactcacactactctggaatcaactactccgcgctggaggtcgctgtccggcggattcagcaggactttgattttttgatgagatacttgcctaagctaccggacgattcctacgccaaaactgaaacgctaaaaatcctcaagcagcataaagcgtatatggcacagtttgaagaaatgctgaacgatgaaaaaatcgcataacgacaggcacttgtaagccatcaacgagccactagccgcaagtgcagggtggaaaacttccgcgcccttgcgcctgatatgaaattggaactttgattttcttgcccggctttgccacggtgggacgatcaaaggagcgtgcgtttgaacaaaaagaaaaagtccacaaacccttccccctaccccgatgaagtcatcgaccgtctggcgcgggcattctacccagccatccttgcctgctggaacagcgaggaaggccagcgggagtttgctgcatggcaggcggaacaggctcgtcatgcaaacaacgaaaaacaggaagttcccactagcagagttcccataaaacagtatttgcaaaaattcccacaatgggggaagatttggcgtgacttcggtcacgccttttcttttgcttccagttcatccagagggatataccccagcccatcgtacttgatatggatgtgctgcacccgctttccgctggacttatccggggcatctacatagatggccgacaccagttcacggagagcataaggggtgagttcttcaatatgaacgtatttgtgcgctttctggacgaacttctcaatattctcgatctgctgttcctgtacttcaatttcctgctggatagagagggcttcctcttccagatgcttctgttcggcatcgtagctctggctcatcatgtcaaagcgttcatcgctcagctttccgctggcgttatcctcgtagattttcatgaacagccgtttgaggtctgcaatccgcttctcattccgggcaagctgcttcttcaggacggtcagcttttcggtgctttccacccgaagctgctcctccatgaccttgcggaagtagtcttcatgacggagaatgtagtccgtcacccgctgaacatgactcagtacacgtccttccagaacctttacccggatgaagtgtcccttgcacttgctcccgttcttcttgtgcagagagcaatcaaagaagtcttgactgaagtccctgttgttggacgaaccatattgcatcttggaaccgcagtcagcgcagtagaccataccggagaaaatgctgctcttgcctgtccgggtcatgcggtgacgctggttacgaatctcctgaaccttttcaaacacatcatcgtcaataatgcgctcatgtgtatccgggaagatagcctgattttccacaggattcaaatgtctctttttatcccagatagagttagtataggtcttgaagttgactgtgcagccagtgtactcccggcgttccagaatcaaacttactgctcttttatcccagcggtaagggtcttccggggcaggtgcgtttgtactccggccatggctcagcttgtaggcggtgggagtcagaacattgtccacccacagttggtttgcaatttgggtcgggccacgtccctccatgcacatggagaagatgcgcttcacaatcgcagccgcttccgggtcaacaagccaatgcttcgggttctccgggtcttttacatagccgtacggaacattgaccgtcagcggcactccacgctctcccttggccttctggacagcccgaatcttgcggctggtatcgcgggcgtaaaactcgttgaaccagttcttaatacccgcaaaatcgttgtttacgctgttcgggtcaatggtgtcgtaattgtcgttaatggcaatgtagcgaacgctatactggggaaaggtaaagtttgtgtacagacccgtcaaggcagagttgcgccccagtcgggacaggtctttcgtgataacgattcctacatgccctgcttcgatctcgaccagcatactctgaaagccggggcggtcatagttcgtgccggagtagccatcatccacaaagaacactgggttcgggaagtggttctttttggcgtattccagaaggatagccttctggttctcaatggacaggctttcgccgagccgtgcgtcctcttgcgacagtcggcagtaaagtgcggtgatcttattcgttgctccagacattgttgtgtcctccttactctgtggagcaactgtcagtacaggattggttaacgggtcaagtatagcagaattaggcgcagttgtcattcgtctgcaccctcatcttcaaatttttgctgggcgttcttggcaacaatgcgctccagcttcttcaaaaaggattccttgccctcatagctgccggtcacggtgtaggtggtgtgaccgactttctccgtggtggtcagttctggaatccagaaagcggacagattcttgacatggaggttgccgttctcatctacataggagccgtgcttcttctgctcttcggtcaagggctgccgcttgaaatagatttcattttcggagatgctcacggtttcgctggcctgctccttcggggtatcgtcatacagctgggcgaaaaatgccagtgcatcttcgggtgagtcttcctccatgagctgctcgaaaatctgctgttcctctgccgagaggttattccatgcggcttccaactcctgctcgttggctgcgttgacaaaggcttcgatctcttttttcatggtgcatcctcctttggctgcgaaaagcgttttttcaaaaagtatgggttttcgtgagagcaagaatcgtcccgtggccacaaattttcaattcttgaaaatttcctgcccctttgggacagcttcttgttggggcgtgcctgccccaaaccctgccagataaaagcaaaggggcattatctgccccgatgcttttcctttcgcttctgctgtttcagttcaaattgacgctgcttttctgcttcgcgttgtttacggctaagtgcttttcgcaccagcttgttttcttctcgctgcatttgcaacgcctgctgtgattttgtgccgattcctgtggcagctgtttcctttcggatttgccgttgcaatcgctttggattcacagactctttctttacaactgtctcaacagatggactgaagcgcagccgactgtaattcttgagcagatactccaagacttcatagtcctttggttctgcgccaaacacgactttacacactgaaagctttcttctctcaatacgctcaaacactccaatccagaatggagcctcaaaaaacacagtcagctttgtagaatcaatgtccataacgaaaccctcctgaaataaatccttacaggaatggacaacccggaggggaaggttacttacctacaccgtgcggtgcagacggctgggctacctaccagctctagcatctctcaggaagaaatgcgttgcgtttttatcctgcttttattatataaagcacatccctgtgcattatatctaccttaattggttttccaagtgaagtataccacactcgtggtcaaatgaccacccatatatacgagaatttgaccgttttactgcgtacgtgcgtaccaaccttccgtacgcatgtacgcagcgattcgcccgaaacgaaccccataccaccgttccccctcggagagcccactacactttgcagacagcagggctgaaagtgtcatagtgggttattacacttccgcagaagtgccttttcctcgccgcaaacagccggggtgcgcctttgtgagagccttttgtgtggcgaatccacatcgcccacaggcgatgtgagcagggattccaagggggcgcagcaccccttggcacacggactttggtacaaagtctagtgtgttacacctttccagaggtgtacacgttcctgaaatgcaaaaagccccatacccaacaccttgacggtgcggacatgggacttgatgcttcctcggcctagcctggtactcgtaaccaatcctgacatgcagttgccgtgtcatttctcgaaaactgttttacgaatacccagcactggggaactccctgttgtacatatcgctatcgtctgtggcttttggcagggtgcgtccgggcgggcgcaccctgtttttgttatatcacataatgcaatttagattctattaaagacgaaatgataaacttctcatcatataatatagatcacaaacgcttactccaaactcaatcgccacatctggtattttagcatttttactcggatttttgggtgacagaccaccattctttttttcaaatgttactattgttaattttcttactgccgcagttgcaattagccatggatctgcaacactttctcttgaccactctgcaagcgcactttgcttatagcatgtattgctttgaactgcacctaaaactctactatatttttctatgatttcgggagttctatggtcaatgatgtttatcccctgtaatgacttcatccaatttgaaagttcatcatgaccctctgttatttcatttttcaccatatctaagagaacaactgaaccatctttaagtttttcttctagctgttcccaaaagctaggtgcgaggtcaaacggataatacataagatgcggtgtcagcaaagcatttgtatctattagaaaaacttcttgattcacttcgacccaccccccattttgttaaccaaattttcaaaggtagatctattggtattagtaagtctaaaagcgtccgtgtataaagtttttccttcgtgaacgcttgagaccaagctcttgaaaaaacgtgtatcaattcggcttgccgcagttctataatagtctccgccaccgccttgctctttttccttttttcgtttttcattgtaacgatcaaccgcaatttgtgacagcttcctatatacagaataatcaatatatccgttatctaatgctttccttgctataactgtcgtcccacagctaaaatactttgtaagcacatcaatcgttttaattggatcatcaaatttatcgatttctttccactttttctcaaacatgacctgtggaactaaaatttccgcagccactgcattagatacactttccgccttactaacccttgttccagagctatatctgtcattgtataaactattatttcctatacatatatgagcaaattcgtgtagcaaagaaaatagtttcccgttaaccgaatcgtttgaattgataaaaattaatggtgcaagatcatctaccatcgcaaaagcacgaaattcatttatgtcgagcggtcgatgcgtattatttccaacaataccactcatcataacaataacgcctgcttgactaattttatctctcagtgttttaaaagactctacagccgatttgctgttttcataccatttaatttctaactctaaaaccgttcggacatattcggcaaagtcttcagtatccacattgtttttttggcttccaataaattctggagcctgctgttcttcctctatagcatgatttctagcccaatcctgaacttgttccatatcatgcataacatcaataatatttctgctcggattcattgccgatgtgctatctatggttctgtactctaataacggaaattcttctttgggaggttcttggaggaaaaaatacccaaatgggattccagatgctttactaactttttcgatctgattaaaagtgggcactttttcaccacttttccatattgttaaatactttacaacatcccgcggaacattttcttgttgaatatgtgccataacccagtctagcacatctggagacaacttcacgttaatctgcattatgacacctccttttagtattatagcacagattatttgcgattaatagttcattatccttaattttcatcttccacggacacctgcgttaaattttccgaagaaaacaaataatccgaacccgtctcctatcggaaacaagttcggattatttttgtttggtccgagtggcgagaatcgaactcacggcctcttgaaccccattcaagcgcgctaccaaaactgcgctacacccggatatcgaccgccgcttccctaccgaagcgtggcgacaagaagtattatactcaggcaaggccgttttgtcaacagatttttcgattatttttggttttttctgagaaaagtctgatttttacacggatacgcgctttttcgtttttgctgtttttcagtgtttttccgcttctgcggcgcgctgcgcgcggtcgcgttccagcagcgggcgcaggtactggccggtaaagctgccggacacggcggccacctgttccggggtgccctcggctacgatctcgccgcctgcgctgccgccctccgggccaaggtcgatgatatggtcggcgcacttgatgagatccagattgtgctcgatgacgatgaccgtgttgcccacgtccaccagcttttgcagcacctcgatcaggcggtgcacgtctgcaatgtgcagaccggtggtgggctcgtccagaatatacaccgttttgccggtgccgcggcgggcaagctcgttggccagttttacgcgctgcgcctcgccgccggacagggtggtggcgctctgccccaaggtgacatagccaaggccaacgtccagcagcgtctgcagcttgcgggcgatcttgggctggttggcaaagaacaccaccgcttcctccacggtcatgttcagcacatctgcaatggtcttttccttatactttacttccagcgtttcgcggttgtagcgcgcgcccttgcacacctcacagggtacatagacgtccggcagaaagtgcatttcgatctgcagaatgccgttgccctcgcaggcttcgcagcgaccgcccttgacattgaagctgaaccgtcccgggccgtagccccgcattttagcgtcctgcgtctgggagaatacagtgcggatatcgttgaacacgccggtgtaggtggcggggttggagcgcggggtgcggccgatgggctgctggtcgatgccaatgaccttatccacaaattccagcccctctaccccatcgcacttgccggcgcgggagcgggcaccgttcagctcgctggccagcgttttgtacaggatctcattgataaggctggacttgcccgagccggaaatgccagtgacacagatgaactcccccagcgggaagctgacatcgatattgcgcaggttgttttcccgtgcgccctttacggtcaggcagtggccgttgccggtgcggcgggtctggggcactgcaatgcgcttgcgtccggagaggtagtcgccggtaatgctgcgcttggccttacagatatcctttacgctgcctgcggccacgatctcgccgccatgcacaccggcaccggggcctacgtccacgatataatccgcgctgcgcatggtgtcctcgtcgtgctctaccacgatgaccgtgttgcccagatcccgcaggtttttcaaggtggcaatgagcttatcgttgtcccgctgatgcaggccgatggagggctcgtccagcacatagagcacgccggacagggcactgccgatctgggtggtcaggcggatgcgctggctctcgccgccggacagcgtgcccgccgcccgggccagcgtgaggtaatccagacccacgctctgcaaaaattgcaggcggttcttgatttccttcatgatctggccgccgatctgctgctgcttttcggtgaggttcggctcattttgccggataaattccagctcgtcccggatagacatttcacagaactggctgatgttcttgtccccgatggtcacggcaagcaccaccggcttcaggcgctgtccgtggcagtccggacactccacgccggacataaagctgccgatttcctccttcatccactcgctgctcgtctcgcggaagcggcgctccagattttccacgatgccctcgaaggtgttgtagtacaccccgctgccgaactcgttggtgcggtgcatctcgatcttttcaccgttggtgccgtagagcagggcattcaccgcctcggtgctcatctccttgatgggcgtatccagcgtaaagccgtattttttgccaagaccaaggtagtacatctcgctcaccgaaccttcggcgtagtaccagccgctggccttgatggcaccttcccggatggaaaggctgcggttaggcagaatgcgatcctcatccacccgcataaaggtgccaaggccggtgcatttttcgcaggcacccagcgggttattgaaggagaacagccggggcgacaggtcgctgatggaaatgccatgctccgggcaggcaaagttctggctgaaggtcatgcactcgccgccgatgacgtccacctcggctacgccgccggtgagcgccagcgccgtttccagcgaatccgccagacggctgcggatgcccttgcgcaaggcaagacggtccaccacgatctccaccgtatgcttgatgttcttttccagactgatctcctcgtccagatcatacaggttgccgtcgatttttacgcgggcgtaaccggcgcggcgggcggcatccagctccttctgctgggtacctttacgctgacgcaccaccggggcaaggatctggaacttggtgccctcctccagcttgaggacggcatctaccatctcgtccacggtctgctggctgatgacccgcccgcacaccgggcagtgcggcacgccgatgcgggcgtacagcaggcgcagataatcgtaaatttcagtcacagtgcccacggtagagcgggggttgtggctggtagtcttttggtcgatggagatagccggcgaaagaccggtgatctcgtccacgtccggcttatccatccgtcccagaaacatccgggcatagctggaaaggctttccacatagcggcgctgaccgtcggcgtagatcgtatcgaaggccagactggacttgcccgaaccggaaaggccggtcataacgatcagcttttcccgcgggagggtcaggttgatatttttcaggttgtgctcgcgggcacccttgataatgatcttatcgtttgccaaggtattttctcccttttcgttgtgtctgtgcatggttctgtttgcgctcggtctcggcggcggagtccacggtggggttctctccccggcgcaggcggtcgatctgatcccgcaggaaggctgcgtgctcaaattccagcagcttcgcggcttccttcatctcccgggtcaggcgctcaatggcagcttcccgctccagcttgcccatgcggcgggtgttgcgcttggcgttttcggccttatcgctgatctcgatgctgtccgcaatggcttttacgatggtcttgggcacgatgccgtgttcctcattataggccatctggatggcacgacggcgctcggtctcggtgatggcgcgctccatgctgtcggttaccacatcggcgtacatgatgaccatgccctccgcattgcgggcggcacggccgatggtctggatcaggctggtctcactgcgcagaaagccctccttgtcggcatccagaatggccacaaggctcacctccggcaggtccagaccctcgcgcagcaggttgatgcccaccaccacgtcgatgctgcccagacgcagatccttgatgatctccatgcgctcgaaggtatccacctcgtggtgcatatacttgaccttgatcccctgctcggtgaggtaatcggtgagatcctcggccatttttttggtcagggtggtcaccagtacccgctcctgccgctggatgcgggcgttgatctcgcccagaagatccaccacctgcccttccaccggacgcaccgagatgaccggatccagcagacccgtggggcggatgacctgctgcgccacctgtgagctgttccggcgctcgtactcgccgggagtggcggagacaaagatcatctggttgagcttggactccacctcctcaaatttcagggggcggttatcgaaggcggacggcaggcggaaaccgtattccaccagcgttttcttgcgggcgtagtcgccgccgtacatggcgcgcacctgcggcagggtgacgtggctctcgtccacaaagagcagaaaatcctccgggaaataatccagcagcgtggtgggcatactgcccggtgcacggccggacagcaccgccgaatagttttcgatgcccttgcagatgcccacctcgttcagcatctcgatatcgtagttggtgcgctgggcaatgcgctgcgcttcgatgagcttgccctcggcggtgaactgcttgacctgtgcgtcgcactcggcgcggatcttttccagcgcagcggcctttttttcggcgctgacgatatagtggctggccggaaagatggcaacgtgcttgaccacgttctgcttggagccggtcagggggttgaactcggtaatgcggtcgatctcgtccccgaaaaactccacccggatggccagctcgctcatataagccagataaatgtccaccgtgtcgccgtgcacccggaacttattgcgcacaaaattcacgtcgttgcgctcgtattgcagggtgaccagctttttgcacagctcatcccgctccatctgcatcccggggcgcagactgatgaccatgctgcggtagtcgatggggtcgcccagcgagtagatgcaggacaccgatgccacaatgatgacgtcccgccgctcggaaagcgccgccgtagccgagtggcgcaggcggtcgatctcgtcattgatggcgctgtccttttcaatataggtatcggtgctggggatgtaggcttccggctggtagtagtcgtaatagctgacgaagtactccaccgcgttgttggggaaaaacgagcggaactcggtacacagctgcgccgccagcgttttgttgtgtgccagcaccagcgtggggcggttgcactgggcaatgacgttggccatggtaaaggtcttgccgctgccggtcacgcccagcagggtctggcagcggtcgccccgctgcaccccctccaccagctgcgcgatcgcctgaggctggtcgccggtgggggcatagttcgacaccagttcaaatttttcctctgccatcgttttctcccttccgcacatataaccacaatctgttgttgtttcaagttgtattatagcacgcacattttataatgtaaacagttttttgttttaaggccagaacagcgtaccggtcttgaaatcgtagatgggcaggcggttggcgtcccgcatggaaaaatactcggtgtcggtcaggataaagtggtccagcaggtgcacatttaccagccccagcgcccgggcaatgctgccggtagcgtccatgtcctccagcgagggcagcgccaccccgttggggtggttgtggcagagcaccacggcgtccgtgccgcccttgatggcagcagccaccacgttcttgatatccagactgacccggtcggaggtgccctcccgcagccagacggcggcgcgcacccgcttgcggctgtccagactgaccagcatggcgcgctcgtagtccgaccacgcaaactttgccatcagatagctgcccatctgctcggtggtcttgatgcagcgggtggtgctggtgcggctgcgcccatagtaccggctgatctggggcagcagatgcagcatccgggcagtagaggggcctacgccctctacagtgcacagctcttcctcgctggcttccagcaccgccgcaaaatccccaaaccggtcgatcaggtcgtgggcgatgccgttggtatccttttgggcgttggtcaggtaaagcacatattccagcgcctcgtgctcggccaagctgtccagcccatagttctgcacccgctcccgcatccgctggcgatgtcccttgtgccgtttattctctgccatggcggtactccttttttctatgttctctccttatagtacccattttgcggcgcaaacacaagcgttctgcaaaaataacccggattttgcaccggaatgcgcgttgacttcccgccccgcctgtattactataaaagcatgattctgacaaaaacgatgaggatagctttatgaaacaatttactgccaccgccaacgatgacggcgtgcgtctttcgcgctttgtgcagagcgtgacccgcgattttcccaccagcctgctgtacaagagtttccgcaacaagcgggtgaaggtaaacggcaaaaaagccgcgccggaataccgtttgcaggcgggagatctgatcgagctgtacatcaacgacgagtttttcccgcccgagggcgcaaagccggtgcagaaggctgcccccaaaaagcagcccaatcagcccaaggtgacggtcatctatgaggacgaaaaccttgcggtgctgtacaagcccactcacctgctgtgccacagcgaccgcaccggcgatgccaatctggtggacgcctttacccaatacctgacccagaagggcgaatacgacccccacggcgagaaccgcttcaagcccggcatctgcaaccggctggaccgcggcaccgaggggctggtgatcgcagccaagaactacgccgccctgcgggacatgaacgagatcatccgcaccgacctgctgaaaaaggagtactacaccatcacggtaggcatcccgcagtccgggcggttcaccgcatggtgggagcacgacgagaagaacaacaaggtcagcatccacgcccatcaatcgcaggacgagcgccgcaagcagatcatcacggacgtggacgtgctgcgcaccgcaggcccttttgccctgtgcaagatcggccttgtcaccgggcgcacccatcagatccgtgcacatctggcctatctgggcaagccggtgctgggcgatatcaaatacggcaaccgcaagatgaacgagcgcaccggcaccaaaacgcaggcgctgtgcgcggtgcgcatcagctttctggatgtgccggaggaaaacaccctgcactacctttccggcaaggtcatcaagctgaaagacccccagatcctgcagcagttcgatgcgctggataaaagcaaggaagcataacaagacaagaaacgccgttgcgccccgcactttttgtgtaaattggctcttgcagaagtctgcaaaaagctgctggccgaggccatgcactgcaagggctaccgggtggaaaaagccgccgacctcatccccacgctggaagaagccttccggcagacggtgcccagcgtgatcgtagtccctgtggattacagcgaaaacatgaagctttctgcccacctgaaggaggtataccggtaaagcgagacataagctttgcgcttatagcagaacacccccggcagcggctgccgctgccgggggtgttctttttgtagggagatcaggcggctttctgcggcctgtcaggtcttatttgcaccacttggcaaattcttcgtccgtacacttgacgtaatggctgccctccacatggtggctggtgcccttggaatagtcgatgccggaggtggcatagtcataagtttccgccacgcggcgcttttccaccaccgggttcggcagcggaatggccgacagcaggctccgggtgtaggggtggatggggtgctcaaagatctcctcggtggtgcccgtttccagcaggtggcccagatgcagcacaccgatgcggtcggagatgtacttgaccatggacaggtcgtgggcgatgaacagatacgccgtgccggtttcctgctggatatccttcatcaggttgaccacctgtgcctgaatggacacatccagtgccgagatgcactcatccgcaataatgagcttggggttcatgatcagggcgcgggcaatgcccacgcgctggcgctgaccgccggagaactggtggggatagcgctcggcgtgctccggggcaaggccgaccttggcaaggatcttttccaccttttcgcggcgctctgcctgcgttttgcatagatggtggatatccagcccctcgccgatgatgtcctccaccttcttgcgggggttcagggacgccatggggtcttgaaagatcatctgcatctgggtgcgcagggtgttgttctgcgcatggctcagacggccgctgatatcctgcccgtcaaaggtgatcttgcccgcagtggggtcgtacaggcggatgatgctgcggccgatggtggatttgcccgagccggactcgcccaccagaccgtaggtctcgccggggtagatctcaaaactgacatcatccaccgccttgactgtaaaatttttgttgacgcggaaatactgcttcagtccctcgaccttcagcaacggggtcgtgctctgtgctgccatttattccgcctcctcgatcttttttgcttctgctttcatgcgggcaatgcgctccttgagctccggcggcatctccaccttgggggcgcgggggtccagcagccatgtcgccgcatagtgggtatcgctgatcttgaacatgggcgggtcgatctcatcgtcgatgttcagcgcaaagcggttgcggggtgcaaaggcatcgccgggcttctcgtgcagcaggttcggcggcgagccaggaatggtatacaggcggtcatcagcggtgtcaaggtcgggcatggccgacagcagaccccatgtgtaggggtgcttggggtcgtagaaaatttcgtcaatggtgccggtctccacgatcttgccggcgtacatcacatccacatagtctgccacctttgccacaacgccaaggtcgtgggtgatgtagatgaccgagatgccgcgctccttctggatgcggcggatcagctccagaatctttgcctgaatggtcacatccagcgcggtggtgggctcgtcacagatgagcaggtcggggtcgcaggagagcgcaatggcaatgaccacacgctggcgcataccgccggacagctggtgcgggtagtttttcatccgcttttcggcatcggtgatgcccacctcttccagcagttccagcgcctttttgtaggcctccgccttgggcatcttgaagtgccagagcattccctccatgatctgcttgccgatggtcatggtgggatcaaggctggtcatgggatcctggaacaccatggcgatgcgcttgccgttgatgtggcggcggatccactttttatccttttgcagcaggttcacggtctccgggctgccatcggcatggtggtagctgaactggatgctgccgctgttcacggtggcgttcttggccagaatgcccatggcggctttcatggtgacagacttgccggagccggattcgcccaccagcgcgaccgtctcgcccttgtacaggtcgatgttcacgccgcggatggcgtgcaccgggcctgcggtggtcttaaaggtgatatcaaggtctcgcaccgacaagacctgttctttttttgtttcaggcatggggtgttcctccttacatactcttcatcttggggtccagcgcctcgcgcaggccgtccgccacaaggttgaagctgagcatcagcaggctcatgactacaatgggcgggatgatctgatacggatgggtggtaaagctgttgtacagctcgctgatcagagaacccagcgagcactgcggcaccgggatgcccagacccacaaaggagaggaacgcctcggtgaagatagcggtggggatgctgaacatgacctgcgtgatgatgggtccgatgatgttaggcagcacttctttaaagataatgaagaagctgcctgcgcccagcgtacgggacgccagaacgaactcctgatccttcagcttgagcatctcggcgcgggcgatgcggctcatgcccacccactcggtcagcatcagggcaaagatgatggtcaccatgccgggctgcaataccagcagcagcagcgtgacgatgaccagccgggggatgccgttggctacttccagaaagcgctgcatcaccatatccaccctgccgccaaagtagcccgagatcaggccgtagctcatgccgataagcatatcaatgatcgccgccgccaccgcgatgatcagggagacccgcgcgccttcccatgtgcgggtccagatgtcgcggccgtacaagtcgctgccgaaccagtagtagacgtccagcttatccttttcctgataagcgttggtcaccttggtaccggtggtggtgctcatcttctcgctgccgtccagaatgccgaactgctcaatgcccggcacgcggggtgcaaagtttttctggctcagatcctgcccggagtaggtgtagctgttcatgcccgggccaaatacggccagcagcacgatgaccacgatgaggacaagccccagcacggcgctctttttattgaaaaagcggatgagcgcttccttccagaagttctgcgccgcaaagttggtatccacgctgatctcgtcctcgttgtgcttgagggcaaaatccttttccgcaaaggtgtgctccgtgtacattgcatccacggcgctgacaatggcatcggcggtggattcgccgcccagccggatcgctttttctgccatttagtcgtccccctttgccaaacgaatgcgcgggtcgatgatgccgtacagcaggtcaacgaccagcatgatgccaatgtacatggcactgtaaataaagctcagaccaatgaccacgttgtaatcgttggactggatggctgtcaccagcagactgcccactccggggatggcaaagatcttttccaccaccagcgagccggtcatcagatccacgatcagcggtgccagcaccgtgatgatggggatcagggcgttgcgcagcgcgtggcggaagatcagcgccgggccggagatgcccttgctctcagccagcagcatataatcggaatccagcacctcgatcatctcactgcgggtaaagcgggcaatggatgccatggtgaacatggaaagcgaaatgctgggcagcacgctggagccaaagatgtccttggcggaaaacagcatggggaaccagcggaatttgaagccgaaggtgtagctcagcgccagtgcgaacacataggacggcaccgatacgccgatgaccgagatgatggtagcaatggtgtccaccacggtgtcccgctttaaggcggcgaggatgcccagcaccagacctacgatggcacccagcgtgaccgccatgccgcccacctgaatggagatgggcagacgggactggatgagctgagagatgggcgtatttttggagatattgtagctgacacccagatcgccccggagcatattgcccacatagcggaagaactggatatagatgggctggtcaaggccgtactttgcatatagggctgcccgcatatcgggcgtcagcttttcatcattgaagggcgaaccgggcatcagctgcatcaggatgaacagcaccagcaggattgccagcagcgtgaacagcgatgtcaggattcgcttgagtgtgtactttttcacgtcgggtggaccccctttgtccaaagcgtttttcgcggtcaatcgttcgcctgccgcgtacaggtcaaatggcaaaaaggcgcacagtggctttttgcgggccactgtgcggccttattcagtatgcttttgttttacacgctcttagcggcgttcttgtacacgcggttcagtgccacagggtggaactccacaccggtaacagcagaagagaccatctcggcgttgcactggccgtacagcgggaagatgactgcctgctccagaatgatctgctctgcctcgtacaaagcagcccagcggccctcggggtcggtgcacagatcgccggtggtgcactcgtcaatgatggcatcgtagtcggcatcgctccacagaccgtagttgttggaattgccggtcacccacatacccagataggtcatggggtcggcgtagtcggggccccagcgggtcaggccgatctcaaagttgccgtcctgcatatcctgcacgcgctgcttcttgggttccacggtcaggttcagggtaaagcctgccagcgtggtctccagctgctccttgacgacctgtgccaccttctggggtgcatcgtcggcatccaccaccatgttgaaggtgaaggaatccttgcccagctcggtcttggcctgctcgtagtactccttggccttgtcggcatcataagcgcagaactctgcaaacttggtctggtcggcgctgaaatcgctgccgtcggggccggtggcaaactgcggcggaaccgcggtgtagcagggtgcagagccatccttcagcacgtccccggtaatggcgtcacgatccagtgcaaaggtgatagccttgcgcaggttctcgttggcaagctccggcacaccgtcgatgttggggctgatataccacaggtaaccggcgcccacgctggtaaattcggggtcatccttgacctgatccacctgctcgccgttcagcagggtcatatccagagcaccggtctggtagctcatcagtgcctgctggctgtccttgatgacctgataggccagaccgtccagtgcgaccttagcagcatcgtagtaatcggggttcttttccagtgtaaaggcagtagcagccggctggtaatccgtcagcttgaaagcgccgttggacagcaccgtgtcggggctggtgccgaaggtgtccttgcaggtgttgaagaaagtctcgttgaccggatagaaggtggggaaatacatcaggctcaaaaagtagctgacaggaacattcagctggacctccagcgtcttgtcgtccactgcggtgacgcccagatcggtgacaggcttttcgccggcaatgatctcggcagcgttgaccacctgaccgatatcagaaagcatataggaatactcggaagcgttggcggggtctacggcacgctgccagccaaacacgaaatcggcagcggtaacggcatcgccgttggaccacttggcttcccgcaggtggaaggtgtaggtcttgccgtcctcgctgatgtcgtaggtctctgcaatagcgggaactgctgcgccgtcggcatccatctgcatcaggccgtcggtgtaatcggcgatgacctcaaaggaggtgccgtcggtggcgatctgcgggtccagcgactgaacctcggtctccagcataatgttcagggtgccgccctgtgcagtgccagctgcagaggaagcagtgccggaagcggaagaagccgccacggagctggaagagccgccgcaggctgtcagagccagtgctgcggaggtaacaccggcagctgccaggaagctgcggcgcgaaatacgacgatcaaatctcatagatgtttcccctctcttcactgctttagctttatactctgctaaagcgttgcgttctaaaaatgcacaagggatgtccgttcctccttctggaactttgcacgcccttgtgctatggacgcattatacatccgtgttttccgaaagaaaagagttttttgaaaatttgtccttgtcaaatacacatttctgcggtttatccaacattttgccggaagtttttcttggtttttgtataattttcactcttgagcacatttcatgtaaagagcgtttcaattgaaaaccctttttaattcaattctggctgtatattttcatctcatttctttcttttattaagaaaaagcactgatttgctttttcatgtgcaaaccagtgcttttcttgatttctctttttaaattgtatttttgtggcaaacagttttttgatgtcactctcaggcttctgccgcgagcgtctccaccgtaccattgtaaacggcagtgtccagctgctcttcggtagcggccacaagggtggtggcggtagccgcacccacaacgttcgtagcggtacgcgccatatccacgatgctggagatgggagaaagcaggatgatggcttccaccggcagaccggcagcggcaaacagcgccgttgcggtaatggtcgccgtgccgggcacaccgaccgtaccaatggaaacgaccacagccagcactacgaggaaggcgtactgcacaggcgtgtactcgatgcccagcagatggatggtaaacactgccagcagggtgggccagatgcccgcgcagcccggcataccaaggtttgcacccagacttgcgccaaaggcggcaacgtcctcattcacacccagcttccgggtcagctggttgaccgtgaccgggatagtacccacactgctctgggaggtaaaggcaacggtagccgcgggccagatgcccttgaagaagcggacgggactcagcttgcccacaaacttgatcagggcgctttccacaacaaagacctgaatgccgcacagcacatacgccagcaccagaacgctgagcagcggaataagatccgcaggagaagaacggctgaccgcacgggcgatcagggaaaggactgcatacggggtaaaggagatcacatagctgaccacgcggcccatcacaaggtcgccggcgtcaatgaactttttaaagggtgccacctcttcgggcttcttggctgcgatcttgttatagctgacagccaccagaatgcagaacaccacaatgggcaccacctcgccgttggaccagtgcgcagccagattctgcgggaacaggctgatgaccgtatccacaaaggtgggcacttccttggcggtgtaatcggtggccagttcatactgcaccccgctgccaatgttagtagccacaccggcgatcagggtgatcaggctggcaatgaaggtgttcagcaccagaaagaacacggttttgagaccgatctgcttcagacggacggaattgcccagattggtgatgctggaaatgatgctgaagatcagcagcggaatgaccacagcggagaccacatgggcgtaaatagtacctacggctgctacgtaagtgtggtgtcccttgaacgcaagacccacgatcaggccaagacccacggcaaggatggtgcgcacgccaaaatcaacgtgctttttcttgtgcagataatacagcaatgcaaaaaatactgcggtgagcgccagcgcgcccagatccaaaatttcggcagacataaaacgttaccctttcttttgtttgttggtttacttcgttttcgtctgacaacacattcgtctgttcataactctctcctatttccacaaacccacacgttatgtatgttttgttgtttgaagggagtatactctccttccgggcaattgtcaatagaaaattcatattttcctattttatttgtaggaaagtcagggataggtgctccgcacaaaaagggagctgccgcaccagataatgtgcagcagctccctttgcatttttattttaccggcagccagaccgttgcttttgccccgcaggggtgcaggcgtaaactatcacttttttaagaaggagaacaatcccttcttttcgtagggctcacggcagatctcgcccacctggtatccggtgccctcaatggcggcgcggagtgccttttcgtccagcggctccttggaaaggatcacggtcctgcccttagaatgcgaggacgagaccttttccaccgggaactcactgcggatcgtgtcattgatatgcgcttcgcacatggaacaggccatgccgtccacttctacggttgtctggaacatttttgtaccttctttcagtttcttatgacgatcatcgttttccttcacatcctctgtgcagggcagaagcaatagttagaactggctaactttcgtttctgagaaaagccgccatccagcggccttcccgcccaaataatacgccctgcggctacatctgtcaaggcatccggggcatttttgctgggacagcagcttttttatttcgatgcgtcagacgtcccgtctcagcagctccgtcagactgcggaaggtcctgccatggctgccggtgacggtctcggcatggagcagactgctgagaacgctttcctccacgcactctgccaccgcccggaacaaggggttgatggcatcatcgtgcagcagggtcatgggcagcagcgccttgtccgaatagtgcggcacccggttggcagtggtaaaggcgataacgatctcgccgctgccgttgccgcagtaggagccggtgcgggaaagccccaccagcgcccggcggcacaaccgccgcagctgccgctcgctcagggggatatccgtagccagcaccgtgatgatggagcccttgtcctcgtggggcgggatgctgtcgtccagcagcgtatggatgggcttgcccgccacgatgaggtcgtcaaacagcgcgtggttggagagtaccagtgcaccgatggtgtactgcttgcagtccagctccaccacccgggaggcagagccgatgccgcccttgagcccgtgacagcgcattccccgccctgcgcctacggcaccctcggcaaagtctgccttgcagtccgccagcgcagcaaagacgtgctgttcggtgacatgaagtccccggatgtcgttcaggccgcagtcgttgcactcgcagaccaccgggttcacgctgccggtggtctcgcagatatcggggttcttttccagcatatacttcaccagtgccgtctgcgccgtgcccacactgagggtgttggtaaacagaataggcgtttccagcgtgccaagctcgtcgatctgcacaaggccggtggtcttgccaaagccgttgataacatggctggccgccagcaccttttcgtggaaaatatctcccgggtgcggcagcagcgccgttacgccggtctgcaccacaccgtctgccagcgtgcagtgccccaccgtcacgcccggcacatcgctgatcttatccagcgcacctttgggcagcttgcccacctgaaaaccccattcatttcccgcgatgcccatcgtagttcctccttgcttttttctaagatgtatcatagcatttctcctgccaaaagtaaaccgctgtaacagaccggaagcagacctgaaaaaaggctgccgcacaggatctcactgtacagcagccttttgctattttgtaaaaacaccgccgcagcgcggggtgttccatcaggagtgctcgagcgggcggaagagtcccttgaccttttcccagcaggccaccacccgctcccgcggcaggaaataattgaccaacagctccacgatcacgcccactgccgtatcgaagatacggttgagcgcgtaggcaacgtaggtctccaccggggtgctgaacagcacgatgcaaagcaccacaccgccgggctgcacaccgcccggccagaaatactggcacagcaggatgagcaccacaatggccgcacccagcagcagcgccaataacatactgtgtccgccctgcgggtaaaaccgcagatacacccagaacaccgcaatggccagcaggccgccgatgagggtgccgaacagacgattaccgccgtttttgatcgagtccggcatatcggtgccaaggccgaaaatgacgccgatgcaggcaaacgccgggttgcgctccagcaggcagtaaacaacagccaccagtatggccgttaccgccgttttgatggtgcgccagcccacatgaagccggaaatcctcgcgcgggaactgaaacatttccaaatcctcctctttttactttcctgtttcaggataccacagggttttgttggatacaaggtttttccgctagtagattatttaacgagacactcccgcgcaaaaacaggaccccggagccctttttgagccataacggctccgaaaaaggttccggggtttgtgtaatgcttttcagccgcccaaagcggatttattttccaagcacaacggagagtttgatctccttttccgtctcgctcaggtcaagagcgccgccgtcggcaacagtcacacgcagctcataaagcgtaccggcggtaagctccgtcacagcattgccgtcctcgtctgtgatcgaccacagtgcagaatcgacctttgccagcctgccgtccgcgccataggcgtagaggatcagaccggaggtgctgccggacaggttgttcatacggaaagccacggtggtgttgggatgtacgttgcggactgtcgccgtgttgcgccagcttgcaacggtgccttcgccgccgtcctgcgcaaactgttcctgcgagaggacatttcttgctgcctgatcaagatcgaccttgcggtagggcatttcgggcagataaacgaaacggtcctgcagacgaagcagctccagatagcctgtcgggcagtagagcgcgttgccgctgttgccggcatacattccaatggccatgttgttgtagccgtacttgttggaaacatccatcgtgaaaacagtctcgccggtttcaaagtccagaatgatgtactgccacatcccggtggtcacatcctgcacatagccgtagatatagcccgttgcggtggaaagcttcatgatggaagtatcgctcaggtcgttccggctccagatgctcttcatctcgtagccgtttgcggtctttacggtgtccatgcgctcaatgcccggggcgatcatgacgttgcccttcatgagccagttctggtcgtaaatattggcgtagctctggatggaggagtcgttgttggggtccgccagacctgcattgcccgcgccaaaccagttgcagacgatggtactgacggttccattgccgtcatcatagacgatggcagagttctcaacggccacctgatagccctcgggcaggtcatccagcaccggggcgcttgccacgacctcgccggtcttcatatcaagtgcaagaaggtttacggtatcctgattatcggtgaacagcacaaggttcggtgtcagtgtgggagagcagccgccgccccatgcaagaccgccgccggtggtcttatcgccttcgccgctcacctttgcgcctgcgctctcatagggcgtgcaccacacaacgtctacgccttcttctgcacgcagaagatagcagttctggttggtcaggatcaccgcgccgtccttggaggcggcgatgccgttctcggcaccctcgccgggggtcagctcgtggacaaagacagcctttgaaaggtctgcctgctcaccgttcaggatggcatcaatggcagaacgggcaatgtagccgatgacgccctgctgctggcgctgcgggtaaatgcggaagccgcccgttgcaaaccagaggtttccgtcatagtcaaagaccacggacagaagattctgcgtcagttcttttccaagtgcagcctcggcagccgccttgatatcaatgtccagcaccttttcaaattccggcagcacattgccgttttcgtccgttgcgcggagcatcagcacatggttgttgctcgtggggcagacgatgcggttggacgcgtccatgaaggtataggagctttggatgacgtacccgccgccgtcatgcttcttcggggagaaatagccgagcgtctttgtctcctcggcgttcaggtcgcggatggcaatgccgcccagcagcggcacaacagcatgaccgtagctgtcaaaatagatggcgggagaagcatttgcattcgttgtctcgtaggaaacgttgatctcgggataaatgcccagcggcaggatctcatccgtcgagtcggtattatagccgtcgtgatgaatgtttgcatcgctcttggccatataggggttttcctccacctgcttggggttcaatgcctttaccggcagcgccgcagaggtcgtctgtgcagaagagggctgcaccgcagcggacggtgcagcgggctgcgaagctgcgccgctgtctgcgggcgtctgcgtaccgccgcaggcggccatggacaggcacaatgctgcggtcagcgacaagcttaacgcagaatggatgatccttttctttttcataaaccgttctccttgttgtattcgttgcggtcaggccggcgctgctctgcctgatctttcccatccagccagctgcaaaagccctgccgcagggcggcttcggtcaccggctccagcagaaaatagtctgcacgcagccggaaggcatggagcgaaaaatccagatcgctgcaccagataacacgtgtttggggacaaagcgcgcgcagatgctctactgcattcaagccgtcgacacccggcagggcgatcacggcgtttgtcagcggctcgctgcgtgcggtttcaaaaaaactttcctgatcgtggtaacagtccatttggggaaacaaacaatgctcggcgcagaaccgcaagatctgctctgtcagaaaagcttcctgcgccctgctgtttgtcagcacggcgattcggtacacagctttcctcctttctcttcttcccttattgggggcttctgtctccagtatacggacaggcgcggtcttttcaaggtatctggcacgaaagcactgtttccgtcacgaaatcccgttttctgctgcgacagaaccgggcaactgtgctataatcaggatgaaagagtttataaaggaggttggaagctataacaatggcttcttggtacagcatgagatttgcgatcgttgacgaccttgataccgagcgcacgctgctgaaggagcgcttagcgcggcagctgcgccagcgcggcacagaagcagagcttttagaatttgacagcggcgaagcttttctggcggcagaaaaagagcggcgctttaccgccgcatttctggatatttacatggaaggcttaagcggcatggacgcggcaagggagcttcggaaaacagatacggactgccttctggtttttaccaccacctcgacagaccatgcgcttgagggctttcaggtgcgggcatttcactatctggtcaagccattttccgaaaccgagctttccggtctgctggatgaaatgctctcaaagctcccgcgcccggagccgatcctgacggtaaaggtggatggcagcgacatccgtttgcgctatcgggacatcatatctgccgagcatttcgcccacatgatcaacatccgcaccactgccggcaaaacgcttgccacacgccaaagcttcaaggcattcacagagccgctcaaaaaagacccgcgctttttcgtctgcggccgcggcgcgatcatcaatatggagaatgctgccgattttcaggatgccgccttctgcatgacggacggcagccgtgtctatgtcagtcaggagcttttgaaagcagcccggcaggcgtttatggaatttctgctgcaaagggggcgtgtgggttgaaggacattctgcgcccgctcctggagcttaccgttgtgtttcccggcctgctgctcgcgtattttccggtgcgctcctatctgaagcagtctcccgcaaggcttgccgcatgggcggtgccgctgctgctcgggctttgccttggcggcggactgctctgctatcatttctgtctctccaccgcgttccccctgctgctcatcacgcttgcggcaatttttctgtatctcaaaacgctgcggatctctctctggaaatccgggacgatcgcgctggcggtctgcgcggtgtttgcgtgcctgaacagtctgtcccgcgccgtcggcgcggcgatcacgatcctgctgcagctgccgtcggacaagccgtggttctgctttagtgcctgcattttttataatatggtctgctggctgaccgcagcagcagcgtattatcccgccacccacgcagtgcgcaccatggtcgaggatgaaaactttgcgcagacgtggtacgtgttctgggtgctgccgctggtgttcatcctgctgaatctttttatgatcccgcgctaccagataacgcttcggacagggcgggtgctgcaggtctacattgttatgagcattgcccttttgttcctgatgttcctgttcaacgcgatctttctgctgatggcaaacagccttaacaggaatgcgagattgcagcaggagaaccagtttctatccatgcagcagcagcgctatgaaagcctgaaagccgctattgaagaagtccggcaggcgcggcacgatatgcgccaccagctgaatcagatctctgcgctggctgaagcaggcgatctggatggcctgaaagcttaccttgcaaaaaccgtctcccggatcccgaatctggatatgagtttctgcgagaaccgtgcggcagacagcgtcgttggctattactgcacccttgcaaagcgcgagggtatccccttccgtgccaagctcgacttgccgcaggcgcttcctgtggacgagatcgatacgtgtctggtgctgtccaatcttctggagaatgcatttgaagccagcctgcacaccgcacccgcccggcggcagatcaggatcaccgcgtatgtccatgccgagcggctgcttctggtcgaggtggaaaacgcatttgacggtgaagtcaacgaaaaaagcggagttttccgctcgtccaagcgaaaagaaaacgggatcggcatccagtctgtccagcatattgcagaaaagaccggcggcgcaagtacgttcacctatcaggatggcgttttctccgccaaggtcatgctctgcgggtaatggcgtcccatcgtgcaagggcaggcatcccgtctgacgcaaaacgcttcgccattaaaaaaccgcgaggatgcgttcataaaagcgtttcctcgcggtttgatcttttataggtttattttatagcattgtgcatttttacgcacaggcataagtcttaaacagcgtaacccttgttcttgatgacctccacgacctgagagacgtacttctggcaggtgtcgtggtcgggggcttccaccatcacgcgcacaagcggctcagtgccggactcacggacgagaatacggccggtatcgcccagtgcttctgcaacggccttgacggcctcctgcaccgccgggtcgttctgtgcggctttcttgtcagtcacacggacattctccagaacctgcgggtaaatcttcaggggctcagccagcttgctcataggcagcttcttggccagcataacttccatcatcttgagactggtcaagatgccgtcaccggtgctggcgtacttagagaagatgatatgaccgctctgctcgccgccgatacggcagccgttcttagccatgtactcgtagacgtacttgtcgcccacagcagtcttggcgtagccaatgccctgctcatcgaacgccttgtagaggccaaagttggacataacagtcgtgactacggtgttgttcatcagctcgccgtgctccttcatgtagcagccgtagatgtacagaatgtggtcgccggtgatgacattgcctttctcgtccacgcacaggcagcggtcagcatcgccgtcgaaggcaaagccgacatccagaccgttctccaccacaaacttctgcagaccctcaatatgggtagagccagcattgttgttgatattcaggccgttgggcttgttgttgataacataggtatctgcacccagagcatcgaaaacgctcttagcaatattccagcttgcaccgttggcacagtccagaccgaccttgacccccttgaaggaatagatgcccagcgagatcaggtagcccatgtaacggttgcggcctgccacatagtccaccgtgcagccgatgtgctcgcgatgggcaaagggcagctccggccagtccttatcaaacacatgaagcttgccgtcgatgtagtcctccaccagcagcagagtctcttcgggcattttctcgccgtagcagtcgatcagcttgataccgttatcgtagtaggggttgtggctggcagaaatcatgatgccgcaatcgaaatcgtccacgcgggcaatgtaagccacagacggcgtagtagtgacgtgcagcaggtaggcgtctgcgccggaagcggtcaggccagcgacaagactatattcaaacatataggagctgcggcgggtgtccttgccgataacgatacgggcaggctcgctgttgccgttgcgcttgcggatcatattataataccagccaaggaagcggccaaccttgtaggcgtggtcggcagtcagatcaataccagcttcaccacggaagccatcagttccaaagtactttcccatttcttgattacctcgttccccaaagtgaacttttaatagtgtatatgcttttccccgtcgcacgatgctacctgcaaaaaagcattgtcatccgcatagtgcatcgaatcagggacactgtggatctagtatagcacaattcttgaagcaaatcaccctttctgcagattttctccctgcagacacacaaaaacacccttcctctcacggaaacccgcaaaaggaagggtgttaaactcattatcctgttgtcataccgatcacagcatattcacaccagcaaagccggtatcagccgttattcagcacggcacctcaagcacttttgagcgtaaagctgtgattagcagttctcagcgaagtacttaatggtacggaccatctgagaggtgtaggagttctcgttgtcgtaccaagacacgacctgaacctgataggtgtcgtcgtagctacgctaaattttcacgatttttttgtgatcgttcataatttcgaaacaacagttacagtactacagcataccgttgtcgtaccaaaaccggcttgttcgtaccaaaattataccacgtttaggcgttattttcaagttctttcgcaattttgtgttttagaattatcatattcactctatttctttttattcacatatattttcatgtgacttagtgtgccactcctcggagcgtccgggacccaaggctgccgccgggggcgttcgccctgcccagatgcgctcctcagggtgggggatgatagggttgtatagtgctttgattggtgtattgatggacggaatatggtgatgggtttatttctgatttttgaagaataaattttgaagcgattgaagccgtttttgatgtgctgattgccttgatagcttcttgtctgtgatgttcctttgctttgcttctgccctcccctgctgttcatctgctgaaatttcaccggaagtgattttggactatggaataaaaaacaggtatattattgtttgatatgaaacaatcgttctattataaaaccgcatagatgggattttgtaaccacacccacacggttttaggtctgaaaagtttatttcagctttgcgaggatctcgtctgcgctcgtgtaaactttttctttcacatcatccaggcacttgtcataacggtttgcgatgatggcgtggctcatttctttgaacttagccagatcgttaacaacgacagaaccaaagaaggtctcgccgtctttcagggtcggctcgtaaatcacaaccgttgcacccttagccttgatgcgcttcataacgccctgaatagagctctggcggaagttgtcgctgttgctcttcatggtcaggcggtacacaccaatggtcacagatttttcctgttccttgtcgtactcgttatcttcgtcatagccgtagtaaccagccagcttcagaacacggtcggcgataaagtccttacgagttctgttactctcgacaatagcctcgatgaggttctccggcacatcagcatagttagccaacagctgcttagtatccttaggcaggcagtatccgccgtagccgaaggacggattgttgtagtggctgccaatacgaggatcaaggcagacaccatcaatgatctgctgagtattcagacccttgctctccgcgtaggtatccagctcgttgaagtaagctacacgcagtgccaaataagtgttagcgaacagcttaacagcttctgcctcggtgaagcccatgaacagagtgtcgatgttctccttaatagctccctcctgcagcagaccagcaaactcgtgtgctgcttcgaccagcctctcatcgttcagatcagtgccaacgatgatacgagaaggatacaggttatcatagagagccttggactcgcgcagaaactccgggctgaaaaggatattcttgctgtcgaacttctcacgaacagaagccgtgtagcccacagggatggtggacttgatgaccatgatggcatccgggttatactccatgaccagcttgatcacagcctcaaccgcagatgtgtcgaaatgctgcgtgtggctgtcgtagttcgtaggagccgctataacaacaaagtccgcatcagagtatgcagcctttgcgtccagagttgcggtcaggttcagttccttttctgcaaggtatttttcgatatagtcatcctgaatcggggacttacgatttttgatcatgtccaccttctccgggatgatatccacagcagtcacctgatggtgctggctcaacagagttgcaatggacaggccaacgtagccccctgatgtcaagatagggacaaaaaatttctcaaaaaaagcaaaaaaaataagccccacaaggcttttctgacaattctttgaatcatcagagccttgtagggctatccgttatcttatgctattttgttttcacactgcctgtaatggggtgttctccattgtttccttaaactgctcaactgtcattttcgcttttgccgcagcacgctccagcggtaaatcaccctctcgaacaagctgaaccagcatccgaatctcgccaattccgatgccttcgattctgccttcctgacggccttcttcacgaccttcggctcttacgccttgactaagattgcacacttcaagcacctctctttccagttcttcgcccattgcaacgccaaactcttcttccagaatcttctttttctcagaacctgatcttgtggaagataacagcacttccataaatttcaggattccattatgattctctgtccctggcttgcctaaacaaatcattacgacactcatcaaatcgtagttttcggtttcttcctgcgcttctccaattaactgttcgggtttgatggagtaccgggtaagcgtgttctcaaaaccatctgacggctgagtacaaatccagatggagtagaccttgcgaatcttcccatattcagattttgtaaaaatcgggccgtgctgtacagaaatcattctgctacaataatagattgcccgtttcgtcaatgggtatcccggcttgaattttgtctgtgcttccacattgataatcagacgaatgacttcttcctgttctgtgctgtccgcagatttcggtgcgattgcgtcaaagcgaacatcgtaaaacaatgttccctcggttagcgtagaatggagttgtccatattattgcattcttcgccactgttatatcataggcaactaattatttcagaaccaactaatgtgagattcacatttcagttagtactctcccgttttctatctgcattgcatccgttatcttaaacgaaacaagtcgctgctgtgggaaagctcttccgagcagccgataggacattttcttgtcccacccagaatccccgtaaatcatgcgaaccaatgccatacacttgatttcgccgctattggattcatccagttttcccacacgatgcgctcctgcttcttctgctccacacgcctgtacagctatctgtttcattttgcgattatacagaaaccgatagtgtgacggccattctaacgcttccagcgtttttctgaagaccgtgattcgtccctcttcctcgcagaaactcatgccaagtcctgcctgttgctccgttttctgttctgttttttgcatattgctcacctcccacaaatggacagaccctccccttgtacaacctgtcaattagtcctttccagcttcaggagcaatctttcctgtcagaatccccattgacacatacccatccatttgcttgacttcagattctttccggtgttcttccacaggcacaccaaaagttcccacaatatcatccaggtaaaatccctttcggctgttcacaggttttgttgacgcagcattatcctgcgaatcgactgcgttcttttttctctgtccttcatgaaaaatttctggcacaagcagatcaaaaacatacagagtttcaccctcaaaggtaatcctgtaccccagcattttatagcggcactcgctgtcccatcccattttctgataaactaaagtcgcaaatggcttgcaggacatcttccggcttttgcgcttatccggttttgccacgcaccaacgcagagcgtccttgtcattttcatcacacccacgaacaacgatacgcttcaaatcattgttgaacatgacatgaacatagaccacatcctccagccctgtgatacaggctgtattgaatgtgatactatctttacgaatcacgattgccgggtcacgcagatgggcaaacaattcctttcgcacgacctggtagccatcatacgaaaaggcactttccagttcttccgcccgtgcgtctctatcatcctgcacaatctgcttctctggcggcatgattgttgtgttttcttcattcatctataatcagtccatccttccattatcttctccgcttcacggagcaactcatttagactttctgccgtaaatatgttcatttcctctatctccgtcgcaggacgaaatacatcccagtttccggcataatgctcctgccgtaagatacccacctgtgctatacttgtaatcggctgtccaaatgttccagcccactctggtggaaaaatgtaaatcttctttttgaccgtttcgccctcatcttcttcggtgttttcctttggaggcagaacgatttcttccaccttaatcatttcaggctcatcaaatgcgaacagcatcattttgttatcgccctgctccaaaaactggccacggaaccgataacgcaaatcctcatcccattccataatgtcaaataaagtctttgcaagtccacgacagcccaaagtgcttgcacaccaacgtccctctttcagtctgccccaacggatcgcgtttggattattcttgtcacaggggcgaatggcaatgcagcgttcaacagaatttagcagcagctccacatattcaacattttcaaactttttcaagcaagcggtgttaaagcgcaatcgtccattagaaatcgtcatagccggattctgcatagtagaaaaatactgtaccctgactatttcatagcccgtcagatcaagacgctttttcacatccgcagtaacagtgacatccggttctttcatcacgctttcagaggcttccctgtattcttctgccgaaaaacctgtccaatccttatcaaaaggcacatatcctcgcaaaatcccatcttcaaccacgctcaacacgggcaagggtctgtttttctttgaataattgcgggatgcccgcagatgattggctgcattaaaaacttctctggaaacaatggcttcatggtgattcttctgcctgtactgtgtccgatcattgttgtttttctttgatttatgcgtcaaaaagttcggtgtaaaggtctttcttgccagtacatcaccacaatggcgctcatttgccagaacacctgcaagtgtaccgggattccactccacacgtcccaacttcgtcttacggctatactccatcaaaagagttgcaatctccgtaagcgaatatccattcaggtacaggtagtaaatcacctttaccgtctgtgcttcctccgggttaattacaaggttgccgtcctcgtctttatcgtatccaagcaatgcaggggtcaggaacaggccacggctgaaccgccgatctatcgaccagttcataatgatagatttggaatgcgattcttcctctgccaccgatgccagaatcgtcagaatcatgcgtccattgctgtccagcgtatagatattatctgcttcaaatttcacacccacaggcggattcagattttttagaagttcaatcacagaaaggcagtcaacgatatttcgagcaaaacgggcaatggattttgtaagaacgaggtcaatcttgcctgccttgcagtcctcaatcaactgctgcatcccttttcggtgttccagagatgtgccgctgatgccctcatccgcatagattccaacaaatacccatcccggctgtgcctgaatataatccgtataatagtttttctgaagttcatacgaagaagtctgttcatcattatcagtggaaacacggatatatgctgccacacgccgaatcacagaacttgtttccagatcctctatgattttggcgggaatgacctccaattccgatatatctacacccttatagcggtctctgattttttgcttacggtctactgcttctacttcaccggtaatcatgtacttttcctcattctcccgtatggatgctccaataccactgtcgcatcttccgataacttcggataccgagttctttcttcgtattttctgcggttctgcggctgattccttcatctttcatccgcatatagatttctcttgctctcatatcgccatcagaaagcaacttttttatcagatatgctgccttttctgtttttgactcaaattctggcacttccgtttgttccgctgaaacgaatgtgctcttgcactccaaccattgaaaacccatctctgctgttatagaaaaccgaatttctccatcagacggagccaaactgttttttatctgccggacaatgcgaatatctgtatctttctggtcacgctccacctgcaaaacacttcgcgcagcagcaaccacatctatgctgccaaggcttcggtacaaacctttcgttccctctttcttattgagatgaccaatcagcacaatggcacaatcatatactgaagcccacattccgagacgctgcatcagttttctggctctccctgcaatctgaaggtcagaatcacttcctaaatacgcctgaatcgggtctataactacaagccgtgggcgaaattcaatgattgcctgacggatacgctcatcatccaacgttaggccactgtatgtttcttcattgataaaagctacttttctacaatctgcgccgcatctttccagtctgggtttaatggtatctgatactccatcttccgaacactggtagataatcctttgcggcatcccaacaggctttccatccggtgttgtccctcccttagaaagttccgcaatcagattcatcatcatggttgactttccatcgccgggatcgccttgtagcaatgttatctttcccactgcaatgaatggataccacaaccagtgaacagaagttgcctgcacatcactatataatgtaagaattcttttttctaccttgtccgccatcgtctttccttcctatttgcagtcttttcctacctctattataaagcattcgttgcgttttgactgctacccatcaggtagcatgagttgccttttgctacccagtaggtagcaaaacagcctaagaccacagagcagctagcagtgtgtccctttgcggtcttagaacctttgatatagagttgctctacctaccatcatgcgagataattgtactgccttatgcggggaatcataaggagaaaagcacatggctactgattataaagctttgggcaagcgaatttcaaatgcccgaaaacaagctggtatcacgcaagaggcccttggagagcagcttaacatgacacgaaaacatattagcgtaattgaatccgctatcaaacgcccaagtcttgatgcattggttgatattgccaatgctcttgacgtatcgactgatgatttgctggtagatagtttgatacactcgacttcaacctcaaattccgaaattcaccgtcttctcttggactgcaataaaatcgaacaggaaattctcactcggatggtaagagagatgaaagcaatactgtacggtttaggaatctgattttgtaacccgttgatcatataacaaaaaagcccgcataagccacagctgcacttcggattacaccggggtgctgtctgcggcttatgcgggcaaaaccattcctacggaatgaaatgcccgcctgatcgagaagatttgcgaatcctctcaaccagacgggcattctttttgctcaccttgctgtttctatgcggttatgtgccatacttttccaatgctctccgaatcacatcctcacagttgaactctattttcatcgtttggtcgtcatacagataaaccatgctcacaaaagcatccacacattcttttgtcagcccaccgatgtacgttttctcgctggcctgctttgtcagagcgcggatttcttcatctagttcatcggcacacttctgttcttccttttctgtccgtatgttatcctgcaatgcagccagtttttccgaaagagcctttttcttttctatgtacgcatcccgcagcagtacaccgtccgcatacaattcatacagtttaatctgctccacccgaatgacttctgcttgcttttccaagtcctcaatgtccatgcagcgcaccgtgatagactgcttttcctgcattccctgatttaccacatccagtgcatagaacacagtttttatcgcacgagccacttttgcgttcaccgaatattctctataatagccgccgtagcatttagagaactttcctgccgcccttttatagccgcaacagaaaaccatttccccatactgcttttcgtgccgaagctgccgtttgcagtttccgcagcaaatcttcccttttaacgcgaaatcatcacctactttatactgaattggggttacgttacggattgctttctgtgcctgatagtattcatcttttgtcacgatggcctcatgtgcattttctgcaatgatccacttatcctccgggagggtccgaacagatgtagtgtttacatcaattttctttcttctacccataaccagtgcaccagtgtattcataccgtctaaggattctccacacgattgccgcattccacagcatttcactgtccggagcaataataggattactgcccatcagcagattttttcgtttcgcatacaatcccggcgtaggaagatttaattcgttcatgccgtaggcgatctgcgttgtattgcggccagacaatgccagttcaaatacttttttcacgctagctgcggcctccggatcaatttcccaccgctgtccgcctttcttgttccacacatatccgaaaggaacattcgtgcaggtggcttttccgttcttccagttcgtttccagagccgcccgaacttttttcgcaatatcccggctatacatattattcaccagattgctgactgccacttcaattcccggcgtaccgttgttcagtttcacgctgtcaaaggtattattcacagcaataaaccgaactcccatcaacggaaaaatctgctcaatataatcgccaacaccgatatagtcacgaccaaggcgggataaatcctttaccatgatgacttttatatcgccctgcttcaaatccacaatcattttctgaaaagccggacgattaaaatttgtgccgctgtaaccatcgtccacatactcgtcgaacttgtgcaattccgggtgcttacccatgtaatcgttcagcaacgctctttgatttttaatgctgttgctctcctgctggtcgccatccgaacgcgacaatcgaagatatgtggcacagttgtatttttcatttccctgaaaaaacataaaaagccgataacctcctaatctatttgtcgttcagacaataaaccaagaaattatcggctttatcagcatattctgttttgacccaaagccattatctcatatttcgtggttcatgtcaacgctttaatgtgctaaagtgcaaattttcttctgctttcttcttttttatctccgatgcgtccgtgcgcattttttcagtgtgtcctctaatcggttctctcccgcaaagctgatcttcactaccatgcccttgtcgagatagcaataagggttcttgatttgcgaaatgaaatcgaccatccgctcccgctgcgacaggtctttcttgatttccacatcgttgatgtccaccagttcttcacggttcacatcccgaagttccaccgctgccaatttcttcaaatcctcaagtgtatgcgtcattttctggtacatcaaatacctcccttcacctatagcattctaaaaggggtgtttggcaaccaaattttgaaatttcacaaaaatattttttcaagtggttgccaaaaggtgcttccagaatgttataggtataaggacaattctcgattttccaggtcgtggggctttttctctcttagcgcaagattcgcccatggccgctcaaaactcactttcgtggtttttcccggctggcaatcttgatggggattccgttccccattcccacggtacgcacaaaatcttggattttggctatctggctccacatgaatgtgttcgcagccgaacgcctacggcttatcgggagttgctctgcaactataaaatgcaggaggattatgctatggctcgaccaaagaaagacgaatcgcttcatagggggaaacgagtttacatccgtttcacagaattggaatatgagctggtagccggatacgctaaagacgccggatacccgattggtacttttgtacgcaaacaggctctccgcgaaaagctgaaagtcaattataatatcgttgccgatctgggagagattcagaatttgacggtgcaggccgccggcatcgggaacaatctcaaccagattgcccgctattttcacagcggtggtctggcatcacgcggaatgttagaagaactaaaaaggtgcattgcggaaatccgtgaactgcggcaggaaatcgttcagcttggaggtgtgtatcgtggcaattctaaaacacatcgcaagtaaaaatgccaattatgggagtgccatcgactatctgaaataccagcatgatgagtttcatctggttcccgttctggatgaaagcgggaatatgctgcttcgggaagaattttatcttgacggtttgaactgcaatcccgaaaccttcgaccttgaatgtgaactgttaaaccagcagtaccataagaacaacacttacgatgaaatcaaaagccaccactacattatcagccatgaccccagagataacgccgaccacgatttaacaggagaacgtgcacaggccatcgggctggaatacgcaaaagctaattttccggggcatcaggctttggtctgcacccatacagatggcaataatggaacaggcaacatccatacccacatcataatcaacagcctgcgcaaatccgatatagagcctcagacctacaccgaacggccaatcgactgcaaggctggatacaagcaccaccttaccaaagactatttgaagcgcctgcaaaaatctttgatggatatttgccagcgcgaagggctgcatcaggtcgatctgctctcccctgctgcggataaaatcacacagcaggagtaccatgcgcagcggcgcgggcagttgaatctggatattgcaaacatggaacttctgggcgatggcatcacccccatgcacaccacctttgaaaccgataaagaaaaaatccgcaatgccatttctgacattgcggaacgtgccacatcctttgatgaatttcaacggttattaaaagcggaatacggaattttggtaaaagaccatcgtggacgattcagctatcttcctgctgaccgacagaaatttatttctgcccgcgctctcggttctaattatgaccgcgacaggcttctccgcatttttgcagaaaatgcgcggaacaaagaacggaacaatcctcattgggcagcagatgatcctatggctattttgttcattaagtccgatctgcgccttgtggttgacttgcagacctgcgtaaaagcacagcagagccgcgcctatgcgcagaaagtcaagatttccaatttgcagcagatggcacgaacagtcgcttatgtgcaggaacatggatacgattcttacgaaaaactctccgataccactgacgccattcaatctaaaatggcaaaagcccgaagtgatgccaaattcaccgaagcaaaattgaaaaaagtcaatgagcagattcgttatttaggccagtatctttctacaaaatcagtctatggtgatttcttgaaatccggcaataagaaatctttccgtcaggctcatgcagaggatattgccaaatatgaagaagccctccgcatcctaaagcagcactccccagatggaaggttcccgaccatgaaagacctccgggctgaaaaggagcagcttaccattcagaaagatgcccagtatgacacctaccactatttcaaagattaccacagggaactccagactgtatgtgccaatgtagataacattctgggaacagaacgagaagcacggcgcgaacagcagcaatcccgaaagaacgaacactctctataaaacaaaaagccagccctggtctttcctgcgaaagactagggctgacccttttctaccatattactcttagaacaggatttgaactgtcgcatcctgaatcaaatcaatgaactgctctttcgttataacttctttgcggcaaataatcgacttatccgcttgctgccgtgtataagtcaattttctatcatcgtggcgaagctgccgcaccgcatccaaagtcaaggctccctcacgatacatctggcacaaaataaagtcatttgacttaaaggccaccgaaatcggagaatccatcgcaggagtaaattcagaatttcccattaaaatgcgctctgcattcgtttggaactcatgcgcatccgtatcctgcgtgtagattgtcaggctgtccactccatcatgataccacgcgaatatttcagcaaggatcgtcaacgagatttctcccgcattctttttaagagtgcgacccgttgacagcgttcttccatggatcggccattcatcatacagtcgattcatccattcttctgcggaaggcaagtcaatcagatcttcggtttttacttttctgcgaaggaagcgcatcaactctgacacacgcgataccgcagcttcaatgatgtagtacaggttcacatcttcatcattgacaaaagcaccgtactttgtttcatcaatccaacgaataggatacccttgtgcctgaagctgctcaacataggtgcttctgtatgtagaatcttcaatttcctccattacccactttggtatcagaatcaaatcgtatacgctgaggattccatcagatggataacttctctggctcaactcgtgcataaatgccagtgatgagttatccataagtgctattttggtttccccagcatattctttatactctggtatattaagcatcggcctctcccgtcagcattttaaattcacttaaaaccgtttttagaaatgcttcattgtctttatggtattccacttccggctcattgcgaatcgtcttattgattttctcttgcagcggacttacatttactacatacgaaggccgtacaagggaatcatccaatcccaaatcgcggaatctgtgtgcaatgtcttcaacctgcacatcaaagttttccttaacttcttccgcaatagccgtgttcccattctttactgcactttcatacagagagatcagcaccgccttgtagggagcttggaaagcattcatgcactgaaacgcttttgcttggaaatccatatcctttaacccctcaaagtacggcataaggtttcccagaagcataagcgcagcaaagtattctgcttttcgttcttccatcaggatttcggattcaatcaaatggtcaaaagaaacttcatcaaacaatagatgataaatctcatgccacgcagtaaaatactgatttgctctcggaagtgccgtattgatcaaggggattcgttttccatcccgaacaaaaatcgctccgcttaaatagtgattatcaatcggcagctgtatcaaaccatacggtcttaaaatctgtaacgccaactgtatcggagaatttatctgcatcggattgtattttgaccagataagcgaagcactctgcttcatctgttcctcaatgacttcgttccttttgataacttcatctaagttggctgctgtaattcgctcactcatagccttccgcctttaataataaacactgcaaaggtttagaatatcctgcaacagatcgtactccatttttgccttatcattcatctgataatcaatcggcgcattctgcgagtacacggcatctacactttgcactctcggtgaaaatcccatcaaagtatccgggtcaatgctcaaactggtaagaatcttgttcaagtgcttatcgaatgtacttttgctatctatctcgccattcaaaatcttatctaaagtagggcgagaaatctctgttttcttgcagaacgatacctttgagaatccattgctgcgaatatagtcctttaattttgtccctgtcagttttctcttttcaaaaagttcatcaaaacgcatttttcatctctcccttctgctattattatataccatcagcttcgggaaatcaatcgcgatgtaaaaaagttttttacattttggctctacgcaaaaaaagatggcctcctttttagggaagccatctcaacgacattacggcattttaactttttcgacttctttcctgctcctgctgcggtgcattgtctttttgccgccgctcagcctgcttgatatgcagccgatccagcaccgaccacctgccaccaatgcgccggggctttttcggcacattattgacgcagccatctatcatattgtaattttgctctgtgccggattctttggcacgttccgctgtgccattttcaaagaacttctggtggtgcagcagttcaggctttgggccttgcaagaaagtgcgcatctttctggtagcttctccatcgaaacctaaagctgtctgcgtcacaaaggctccactctcgtgaagaataatgctcggcggcggattttttgtttgttcacttctcatctgaacaaatcgctgaccatcgacctccacttcatccgataccagccatgtgcctttttgtcctgccacctgatagccgccctcatcaagaatcaggtatgtgccgctctggggctttggaaaaaagccgttgaatctcaccaacctatccttatcaacatagaaaaaagaggttttgcctgccgcagtcaatccgatcacatcacttaccccaaattttctgattttgaatttgtccgggttaatgctttccatctttttacgaatcgcttccgcgcccattcctcgcgtagccgtaccagaatagcctgtgccataattgtctgcggttatcataaagccatgctgaatctggtattcatagctgcggcagcgatactcacggtttttctcggaattgtcgatctggtaaatcacaaatatatctgaactcattttcctgcatcatcctccggcctatgccattccaattccaaacccttgaactgctgctcattcaactgttgcatcttcggaatcgtctgctggacaagcgcagccatctctgcatccgccgccaaaagcggctgaacctctgtcaacacctgaatcgtatctttgagtgtcggctgctcaaacatcgccatcaacatcaattccagttcatcaaagcgtacattgctcataactccattcctttcgtttttgctttcttcggcttatcctgttcctgtgcaggctgctcctgctttttggctttcagactgcgcagggcatccagaacagactttttcgtactgctgcgttcctgctccttgctctgctgccgtgccgccatcagcttttccatgtcagagatagcccgctgcaccagcttatcatccctgaaatagttgatggagttgatgttctcacgctgcactttgtcgttcacgaccagctcatacattccaacaaagccgccatcttcctcgatgcagaatccaatgcacttgtcagcattcatccgttcggacggaatcttgtcatagacttccaaggcttcttccattgtcagatggtcgtggaactctcccgcaaacgtaaactccaaacactccgcaacataaaagctgagcgtttcttccggcgcaggtctttctgcggcgagtttttctttcaaaacctctgcctgctgctctgccaccatatcggcctgttcccgcagttctgccgcgtccatgatcctgccctgtgctgcatcgcagccgaactctgccagcagctccgtcatagcctcctgcacaggcttatctccgtccgtttcgagaatgccgccatcccgttccgtgaagtccttattatataaggtatagtcgaagccatcgtcacaggtctgaatgtgaaaataggcatccggcaattcgtaggccagttccacatcctgcacagctaacgccccctgtaacagctggacaacatgattctgtatatacgggttatcccagcccggaaccgttttataatcctctacgatggtgtcaagtccgttcttgcactgcaaaacatccagtgaacccggcagaggattaggattcttctccacgcccaaggctttcatgtaatggttcggaagggcctgatactgtgacattgcatcatccagattgccgaaccgctcaattttcaaaggcgcgtcctgcaaattttcgaccacatagaactgctttacaaaaggctgctcccgtgttttctgtgcttccagttctcccctgaacatcgttacaaagccattcagaatagccgggtggctgtcaaccacccaatccgtgcggaaggtcatgcggtctgcattatgctccggggtgctgacctgctctgcccattccttattgccgggagaaaagcggccatcatagtttttatggtgcagagtatttgccagaatgtagcccacgcgctccataccgtactgccgcaccacctgatcgactgcaccatcgccaaggtacattccatcatagttatccgcgatcgcttcttggattgcctgcttgcactcgcagttcagccgataggatgtacggtataaatccacctcgtcattttctttggcatagctgaacggctcataataaacaggcacatccgaataatcctgcgcgctgttgtccggcacaggcacagccttttcaatgatctccgataccacatcttcttttttcggcatattccattttccagagaagtatttcttcacggcctcctgaaaatcttcatcgaagccgttccacaaatcctctgccaccagtttgccctgctcattgaccgcaacgcaggccgccatatcgccgtgttcctcatgctccagcaggaagaacttctccccaccgacttccgtttcatcaacggcataccatgtgccgatatgcccctcaaccgtgatgcagtcagaatcgccgtggatcagtccgttccttttctgctgctgttcctctatgaactctcgcacggtcagttctgcacctgtgaagttcagaccttcctcgccaagctccagccgtccctctgtgccaaggtcaagttcttctgccaccagaacagacgccgcgtggttcaccaccacagttttctccactgtaatgggctggccggggtcgtagtccgagccgcgcagatcatagcgatataagccctccggcacatcttcatcccgcagtcggccattgctgaaaagaccagacttatcaaagatttcgatttcctgcaatttttcgttcaaaaggttctctttctgcaaatccatattcctttccttgaaaaaatccggcagctctgcaaagccgatgctgtccacatagtaggctttaagagacttgccatcgttcagcaccacaacatcactgacggaaagcgaatgtccggtaaaatccgctggacgctggatattgaagcgttcgtaaatagcttccagcgtatcattttccgtaagtggtgcggtatagaccagttcatagtctgcacagtttacttccatcccgtgccgctttacaaaatccagattcataaagcggtagtcgtgttccgggtcacgggcagtgatctggtagatgccaaactgcttttcgctgccggaaagcagcttctgctccttaactactgcatccatacgagttatcagttctgccgccttttctgcggactctccctctgattcctccactgcggcttgcagccattccccgatcgtctgaacatccccagcctgaatctgttctttcagtgcttcaactgcctgctcccgatcctctacgctgtccttatagtggtagaaatcgaagtcaaaggcataatcgtcaaggtctactgccagcttttcaacgggtgctttctcgccgttttccattgttttctgcttgtccttttccaaatcttccttagcaatctggaaatagtcactttcacgttcgatttcttcacgccctgtgacaagaactggccacgggctgatacggataagataaatctgcttgccctcatcaaacagccgcagagcctgctcccgacttatcaccgtcagtgcggcatccgggcgggcatactcatcttccagatactcttcgttcttttccagcaaaattgcactccatgcgtcagccttgattccgaaaatgccatcatgctgttcgatctcttcctgactggcgaaatctcctgccgtgccatcctgaaacagcggataaatccgttcgcccagccgatgccactcccgtgcgccttcctttgtcagcggcagaacatcatctttcagatacccatattcgtgcatttccgaaagaccgatcatgccatccggcagacttacgatcttctcctctgcttcccacatcaggcgattgatttcttccgtgttttcagccgcaaccgcagccgccagattgttggcaagttcttccgttgccgcccggtcatccagcttgtaagcaaagtttacaatgagatttcgctggctgttgtcaaaaacggttttgtcccgttccttgtccgcaatcagcttttcagcatattccatcgccgtcatgcgctccacactcctttctgccaccgctgcttccagtttttccagaaagtcggctgcagtcaatcgaatcgtatccatcgaatctttcagttccttcatctccttgccgctggcccagcttgccacatacgggaaagaatagtcggacgtatcaatacccagaactgagcagaccgtaaacgcaatgctctccgcttcggtttctttcgtgagcctgtctttttcttcgccgcgctgcttcatcgaatcgctgttatgcagcatcgcatgagcaacctcgtggatcatcgtttttatggtctggctctcgcccatgccgacctgaatgcagatttctttgtcggcatcgctgtaataacctttggcatccccttcgatctcatcaaaccgcatcggcacaggcgatacctgctcgattgccgacgtaagcagcgcatagtctttgacgctggccgtcagttcgttcacttccagcgacggaatcggttccccatcggtctgtgaaacatcaaaaatcgtcgtcactcggaagcgcggaaccacatactctacacgttccatttccggttcaccgttttcgttcagcacagccagacccgtatccttgtcgattttctcgcgttcttccacctccttgatgggagccggagcaatgatctggatgcctttttcgccttttttgacataacggttgaacttattcttccatgcgttaaaccctgccaccagtgtggcatcaggccgctgcatagcaatcagcagcgtattgttgaagctgtaattgtggaattttgccatcgtgcgcaagtatgtcgtgtacatttccgatgtaaaaatgtcttttacaccctgctccagccgttccgtgatttctttcatctgctgtttgcggtcaactgccatgcaagccctcctttttcttgacccatcgtgttttcatctggcgcggatattggtcggcctgtttcggtgcttttgcgccgttccactccaatcctccggctctgccctcacaggtatatccggcagctttcaaggaactgccattctccgtatccagaatgtaggtaacaactctgttgtaacccattgcccgtgctgcacggtacgccgccgcatacaggatgctgcaggcgtttggagttccatccgtacacaggcgattaacttccagcgtatagccatcatccaactgccgcgccacaggtctgccgcagatagcaacgcccactaacgcgccattttctgatacgccgatggagaacttatgcccccgcgtcggtttatggtggcggtgatactgctgtacaaatgcgtttgccgttttcaaattgattggtgttaaagtaagcaaatttcctccttcctaaaaaacaccccgtcagataaactgacggggctactcatttacagttccatatcgtgacttttccgcttctgggatttctgcggttctgcggtgcgctctgcctgctttgcatgaagccgtgtcagcacagagggtttccgcacatcatccgcagtgcgctctgcaacgcggcctgcgtagttcacaggctgtcgcggcttgtctgcgacttcggtttcggctgcatcctcgtccactccaagcgcatcctcaccgcccttttcgtccatgttgagcagtgaattcagctctgcaaggcgcgcggatttttcagccaattctgcttcctgcgcaaaaggacgtttggcttcttcctttgcctgcgccaactgctgttccaaggtttccagtctgcgttctacctgcggcaacgctctttcgatgcctgccagtgcattggtaatgcgcagaatgttgccctgcgggtctttgccgacttccatagagtagttccatgcgcccttgatggacaagcggaacaccttatcgaaattgtcaaaccgggagtgcaattcaaacgcaccgtagctgccgatcctgccctcggtaccagccgccttcaaagccttacaagcctcgatgatggccgcacccgcttccttacgttcggtgtacaccttgccgctgatctccatatcgaagtgttctttatcctgcgccagaagtggttttgccgcttccatatccgttttcagtgcttcgatctgaccctgtgccacagcgatttctcgcggatagcggcgcgcaatatccgattccaagctataaatctgactggtgtgattggctttcagcagtttgagcttgctgacctgaatatccaaatccatcttttccttgatgtagggattgcccgttgccagtgccttgatttcggcataggagagggctgtatcatctacatcgtcgcaggcacggacaggcgatttggaagtcatgatctgcgagatgaacttctgcttattttccagaatctgccacatatacgaatcaaacgtattttcagtgacgtaacgatagattttcacctgcttattccggtttccctgccgaagaatacgcccctcctgctgttccaggtcagacggcttccataggcagtccagatgatgcagggcaatcaaccgatcctgaatattggttcccgcgccaagcttcggcgtagaccccatcaggatacgcacctgtccggcgcgcacctttgcaaaaagctctgcttttttggtttccgtgttatactcgtgaatgaacgccacttcttcacggggaacacctctcgccaccaatttttcccgcacatcatcataaacattgaatgtaccatcggcttttggtgtcgataaatcgcagaaaatcaactgtgttcccctatccaaggcagattcttcccagaccttgaacgcattgtccacacagcgattcaccttgctctccggctcgtccggcagcatatcatttataagccgctggtcgagtgccaattttctgccatcgttggtgatcttgagcatattatcgaatctgggattcacattgccattgcgcacggcttcggcgcgatctgcaaaggaacttaccatttcttcctgcgtttcgctcggtttcagcacttcgttgatgtactctgcttgcggcacaggaaggttcagcatatccgccgtctgcacgtctgccgattccttgaacaaggaaatcagttccggcagattaaagaaccgggcaaagcgtgttttcgcgcgatagcccgttccctcgggaacgagtttgtcaagatgatttttgtaagttttctaaattcaaatatttatccgctgaaaaatctcccaacatctcgtgtctgcatatttcttgaaacaccgtattcaaaggcttcttcgcactttccgattgcttcacatttacaataaaagtggttttacctattcgtgttgtataagataaagtgttttctttcatatcgtccgtttctccttttcataaattgactgtggggcattccgtttagaacaccccacaaatacagcctgtttcatctgaacatatcaagaagtcattaagttgcaagtacaatggaaatggttatctttccataccacgcttgtttcttcgtgccttgatacgctcctgtctttctttttcccttgcttctttttcggctcgttcctgtgcttccttaaaagaaaaaagttgcttcactttttcggtaaaaagtttagcaacttcggggaaatgctccaacgcttcaagaaaaggtctgcacttttctttcagttcgttgtatttggttttcattctctccaatgcgtttgcactgtcaaaatatttctgtcggtaataattcgcactctgctccaacttattgatttccgtacgactggtaattccctcttttgcaagggcagtcagttgtgagtagtcctctttggatattgccatcttgcccgtaaaggttttctgtcccataccgtcaatctcgtttaaggtctttgagatatgacggacaggctcatatttcacttgctctttttgaatacgcttctgcaacttctctaatcgttctttgtcctgttggatttgatattgcagggaagtcaaatgctcggctgtacttccgtattcgccacgctgaaagcctttgaacccttgttccgtcatatagtgaaacaattcatcttgcagtatgctgtacgaagctctaaacatcggctttccgttcttcctaagaagcggctttcctttttcatcggtcagcggaatatccgatttccatttctttgaatggctgatttgatgaacaacttccttaaccgttcctcgcagtttttcatctttgcaacgcttgctccataggatttctttctccaccacaggcaaaaccatagcgtgaagatgatagtggtaaacctcttttccaagttcctcggttgccgctacattgatttcatcagcgtgcataacagccgatatgacattatcagcaccgaatttttcctcgataaaatggaatgcttcttcgtaaaactgctttgcatattcgtagccgccgttacgctcgaagtacattgtgttcacatcaatcacaatctcattgaacagcgttgcgtctttcctcagccctcgaagcgacaccataccgtcagtttccatctgctttaattgttccatataggtcggggcaaaaggctttttgaaatgcacattatagggtatgcgttcctcaatcacattcatattttcataggtttcattcttgcgttcgttgtgcctttctgccttgctcacatcagaagcggtgtactttttaacccttgcacaactcatatccgccttgttgtttttcgccatttttgctctcctttctcggcagggcgaagccattacacaacattctttgaatgtgtgtaacccactatgacactttcagacttcgtctgcaaagatgtcgtgggcaagggtgttcccccttgacctcctttgatacctcaatcataaaaacagactgtcccatcagcagacagtccgtttttattctctcggtatatcgcccatcggcaaagaccagtaccacagaaaacctttctttcgggagataactcctgtgttcttctttgcctttttgatggtcgatttcttgaaccctgcggcttcaagtttttcttcacaatctgaagaaagcatttctccgtctttcagcatttccatcagaaatgctttcgccttgacttccttatcgttgggtctgccgattttcggggcgagggattggaacgcttcttccgctgtcatttccatttcggaaataaagtccacacctttctcagatacttcaaacaaaatggcagagcctgtcggggcaaggttggattttacctgcaccaaatatctttccgcaggtacttccttgttcggtgtgcgtgtgattgcaagaatacttcttgcagcacccgcaatgtcaatcgaaccgttagtacggtaaaggggattggtatctctcatcttgttcatatgagcgataatcacaatcgcacagcctgtatctttcgcaaccgctatcagatgattaaactcggctcgtgtttcgttggcattgttcatcgaacaactttctccgatataggaactcatcgggtcaagaattaaaagttttgcgtggtacatctcaatcgcttcacgaatacggttatccccaaaggacaaagatttttcatcttccttgatgaagatgaggttttctccgttcccaccagccgaattgaaacgagggactaccgtatcatcggcgtcatcttccgttgtctgatagatgatagtcataggctcgttttcttccgtttcggtgaagggcagaggttcgccctttgagagcagggcggcaatggaaagcattagcttgctttttccatcgccgggatcgccctgcaacagcgtaactttgccgaacggaatatacggataccacagccatttcacttctttcggttcgatttcacttgccttgacaacttcaagaggtacatttacattcatttcattttccattttcatcattattctttgttctcctttttgataaatatttagggcaatgcactacgatacagcggaaactctgcttgcagtcattactgcattttctgcaaagttcgttgtaggtaatgcgatttctttcattcagaaacaacgcccactcttgtttccgtttcttgctcattctcggcatatcaatcctcctttccgcctgaaaacaaaaaaccacagggaagatacttactgccttgtttctgtcatttttcggggcgaaaatcgggcaaaattgcctttctaagcctttcaaaaaatcacacaaggtattcgtactaacctgtggttatgtatgaaattgtaggttttgggtaacaaaaaacaccgtatttctacgatgttttttgtctgatatattttttgtgtgaggcgatataatgggtaacttttcagtttttcatttggcatcgcaggtgttactcgcctattttttcaagcattgtatcataaattgcttgagtatcttcgacatcgttcattccaataacaagggttttcgttccagatgttagtacaacaaattctttggcacccgtatatgcgtacaaggtataagaaccaaactcgtcattctgaaaaatgcccatcaacaatcttgccgagccaaacccgtttgttcgtactcccacatctaaatctttgcgatactcgatggtatctacctcggaataatcaatctctaaatctgaccaataagttgcattgatggtaaacgaggtgtcctcacaatgaacttctatattacctgtaaacatcaaaactgcaacgccaatgagaatgataggtacgatgatagcggatattttaactgcaatcttttctgctttgcttcgtggtggtgtagtatatacaataccttctttttgatgttgcttataaatgtaataggaataaacaataggaacaatcaccataacggcaatcacgcagaccataatccacaccattgctgtaagtgggaggaaaactgaaaacagcataatcagtccgccgacaacccagaccttaccgccaaatctatgtgttttattccaattctcctcgttattcaaggtccaagaaatcttgatacccagcgttctgttttgcttaactttgggtaagtaattgcctataaagatgaacattactccgagcagagcaggcacaaaaactgctaaatcaaattcttttccaaatgcagtacgatacattattccatttgtgaaaagagatacaacaggcaaaatccagaaaatcatacctaatgccttgggattctgctctttctgcttcttgtcaaaaagtgtaaacaacaagcaaacaaaatgcaatatcaaagtaatggctggcaaaccgaaaacagcgaaaacctttccgctgaacccatcagcatttccatctgctccccagtgggttgtcatagtatcaggtaacttatcccacataatgagaccaaatatcatcggcagtaaaataatgatggatgaaattatgattcttgatttattctttttaagcattgtcgccatctcctttcaaagctgcaatccaaagcattgtttcctccaaaacagaggtgttaatttcgtagaaaatgaattttccctctcttgtatctctgattaaatcagcatctttcagtaccgataaatgtcttgaaatagatggggctgttacggaaaaatgctcggtaatttcacccgctgacattcgtccttttttcagcatattcagaatttcacgacgaatcgggtcagccagagcttttagtgtctgctgtaatcccatttatacaacctcctttaacaattaacctaattgttaattattattatatgcacaaagcaagtatttgtcaataggtttcactgtctttgtttgtagcttttttatgaatatcgactctgtaacgctcaattcctaaaaatcggtggggtggtatgttgatacccctatgtctgtttttagcagtcaaaataagtatttcattgtagctacttccattacactcacgacttaatgacttcttgaatactttccgaaaaagaaaactgccatcagttaagacagcagttccttttcggttggtatgctattaagaatacacaatatcgttcaatacaatctcgtctgcacaggctcggatattattcatcaatccgacccatttcatcatatcctccgctttcagttgttccgtcacaccttgttttcttgccattccctttatcagatactccgccatattacacgccgaagtatcaatttcagtaaggtgttcatataactttccgcttgtaagcagattgaaatataagactttcttgtgttcccttaaatatctttccctcattcttccgtattttgtgagagcagggggttcttcgttttctatcgtcaagcagggatagtaataatctccgatgagttcgtactggataccggttctttcatctgtgataaatcgttgcattttgatttctccttttgcttcttatggtaaaattccaaagatttctcgttatggttctgcttttgacattcctcggaacataatttctgctgactgtgtgtaggccagtaggtactgccacacacagcacagacacgctgacgataataatgatttcctttttctgcttctctgtcggcttttgtcttatcctgccttgcctgatagcaacaatcctttgaacagaatatctgtcggttacttgtaggcacaaactctttttgacagtgaggacatacctttgtcttgacgatttctctaccattttcagcgagttttttcgcctttcgcttctctcggtaggctttttcacgctcacgctgttttgccaatcgttccgcttcaatctgttcttcctgtgcctttatctcggcaagttcttcttccgtataggcaatatcgacttgcccgacatagttaaagtaaatatcaaccttttgtgtccttgcttttcccacgccctctgcttcataaaccacaatcttgtcaatgagttcgtggaacatcaaatcggatatttctgtcggctctttgcacttgcgaattaaagaaatgaaatgcttaatatcaacaacacttactttttcttcggcaagttccttttccatttcctcaatcttcgtttccagttcagcctgctcatcgtcatactgcttcatcagttgcttgtactgtctttcgggcagtaatcccgaaacaagattttcatacaaaccacgaatgagtttggaaagctcatcgtatcgcttctgaaaacggtgcaattccgatttattgtgctttggcttttctgtctgcttttcattccatagtgcttgaagttcctttgcaaaggcttcttcgtcattcagaacaaatcttgacagtcgttttacagccgataatatcaaggcttcaacattatcagcactaatcgaatgggcagtacaggagtttactttgcttgcatatccaccgcaacggtaagaatactgcaccgaacggtcttttttgctgtaatgcgtttgtagggtcatccttctgccacaatcagcacagtacagataaccgcttaaacggttgctgtgcgtacctttggctgctgtcctgctcgctcgtttctttcgcgtctgaacgctgtcccaaagttcctgcgtgatgataggctcgtgcgtattataaaatacatactgctcatcttcatcggtatttttccttttgtgcagtttgaaattggtgctgaccgacttacgcaaaaccgtatgaccgagatattcctgtctgcttaaaatcgctcttatggttgacattccccaaagatacgggtctgaaaactttgttccgttatactgttcggggtgatattcctttgcgtgtgccgccggaattaaagccttttcttcggtaagcaattcagcgattgctctcggactttttccctcgttggcaagcagaaagatacgctttaccacctcagaagccacagggtcaacgacaagcgtttgtttgtcggttgctaatcggttatatccatagggaatagaaccgctacaacgctttccgtctttcatacgagcatcaaacacagccttgattttattgcttgtgtctttggcataccactcgttcattatattcaaaaacggggcaaagtcattatcagaagcattgttactgtcaatactgttgtttatcgcaagaaaacggacatctttttgtggaaacaaaacttccgtataaaatcccacttgcagatagtttcgccctaatcggctcatatccttaacaataatcgttgcgacatttcctgcttctacttctttaatcaactcctgaaaactcggacgattgaaattcacacccgaaaaaccatcgtcagtaaaatgacgaatattcgtaaagccatttctacgggcataatcttccaagtattgcttttggttggttattgaatttgactcaccattaaggtcatcatctcttgataatcgctcatagagtgctgtaatctttgaagtccttgacattctcttatcctcctttctttatgtaatctgttttggtattaaaagtattactccctctaccaataggagaaaataggggtacaaagcggaactgtttttcaaagaatcaaaaaaatattttttgaaattctgcaaccgactttgataacctattttcaatttaggaacgcattaattatcgtcctactaaagtatagccctccggggaaagctcgattgccgtgacggtttcaccaaaggatgccgcccaatcatcgaagtggctcagtcccattttctgcagcgtgtcatactggagataccgcataatggtgtacagttccaccatcgagttgctgaccggggttccggttgcaaaggtcacgcccttgccacctgtcagttcgtccagatactgacactttgcaaacatatcgctggacttctgtgcatcggtctgggcgatacctgcgatatttcgcatttttgtgtagaggaacatatttttatagaaatgcgactcgtccacaaacaggcggtcaacacccagttcctcaaatgtaaccacatcatcctttctcgtctggtcgttcagcttttgcagctttgcttccagtgttttctttgttttttccatctgcttgaccgtaaaactgcggctatcctcactccgggcatcggccagagccagcgtaatatcgtcaatctgacgctcgataatagccttctgtcgttccggggaaagcggcacacactcaaactgcgaatgaccgatcacgatggcatcgtaatcgccggttgcaatgcgggagcagaactgctttcgattgctgggttcaaagtcctttttcgttgccaccagcacattggcattgggatagagccgcaaaaaatctgcgccccactgctctgtgaggtggttcggaaccacatagaggtttttctgcgacaggcccagtctgcggctttccatgccggcagcaatcatctggaaggtcttgcctgcgcccacgcaatgcgccagcagcgtattgttgccgtacagaatgtgcgccacggcatttttctggtgcggcatcagagagatttccggggtcatgccctcgaagcggatatgactgccatcgtactcacggggacgaatcgcattgaaaatccgattataggtcgcacacaaatcctcgcggcgatctaaatccttgaaaatccactgcttaaacgcttcccgaatggattcctgcgcttgctgtgcaagcatggtttcctgcttattcagcacacgatggtcgccatccgcatcgtgaatcgtatcgtagattttggtatcgcggagattcaacgcatcttccagcagcttataggcgttgacccgcatcgttccgtaggtattggtaacaagcggattgccgcgatccagcgacttgctcgaaatgttccatgcaccagaaatttcggaataggttgccttaatgtcaatcccggcatagtagttcggtgttttgaacacttctttcataaactgcgtgatatactccggcttcacccagttcgctcccagccgcacttcgatttccgaagcgtccaggtctttgggctgtacccttttcaggtaatccacattgatctgatactctgcatggttcgcagcaaaggtttcagctgtggccagtttttcacgaacattgccggacagatattcatccgaggtttcccactgctgtgtcacaggatttcggaaaatcgcacctgccaattcatccgtgatctcctgttccggtttaccgcagagctgcgccataaacggcacatctacccttgctttctctccgatggagagtgccagggcttcgcttggcgtgtccaccgaggtaacgggttccggcttacggatggtgcgctttgtaaaaatatcggccagccgtttgagattcttctcctcatccagaatttccagtgatgccagcagacaatagctgctgtcctgtcggaatgcccgcttgttggccgtgctgttgatcaaaccatactgcgccttaaatgcagtgtactgctgtttcagttcattctgtaaaagctgtacttccgcatctgaaccatcatgcagctgacaatccaacagcttccgggtggtttcccgcagagcgatcatgcccagcactcgctctgcagttacggcaggcagttccaccttattcataaaggaattttcgcggtagtaaatctgcccgtccacgttcgtgaagctgaaattcttcacacttgggtctgccggaataggttcttcctgcacttccagctcatcatcggagacttccagctccgtgatggtagcctggatgttgccgactgcctcttttaactgcttagcaaggtctgctccctcgatgggcttgaccgtaatttcctgcttgccgtactgggtgctttccgtggtaatctcccccagcaccatctcaggatgctgcgcaaaatactggttgatggagtacccttccggcgttccgccaaggtctacccagtcagcccgctccaccgctgcgcggtcacgcttctgcaggaacagaatgtcagcaaccacaccagtgttggcattgcgctggaacgcattgttcggcagacgaatcgcacctaccagatcagcacggttggcaaggtactcacggacagaggaatccttcttatccatcgtaccgctggacgttaccaccgccaccacaccacccggacgcacaaggtcaaggctcttggcgataaaataatcgtggatgagaaaattgtggcggtcataccgcttatccggtactttgtaattgccgaaaggtacgttgcccacaacacagtcaaaaaagctgtccgggaactgcattgtttcaaagccctgcaccgcaatcttgtttttctggtacaactgctgtgcaatgcggcctgaaatgctgtccagttccacaccgtacatccgaatcttttccatgctgtccggcaccagacccatgaaattgccgacaccgcaggacggttccagcacattgcctttggacaatcccatattgcccagagcttcgtacatcgccttgatgaccgtaggggaagtgtaaaacgcattcagggtactggcacgggcttccttatactcatctgccgtgagcagcgattccaattcagcgtgttcctttgaccagtccgcattgttttcatcgaacacctgcggaatgccgccccagcccacataccgggaaagtatcttctgctcttctgcggtagcctgccgctgctctgcatccagtgtctgcagcacccgaatggcttccacattggctttatactttgttttcggccctcctgcgccgagatcatcgtccgtaatgcggaagttaataggtttctgtttgggctgtgcaggctgttctgtttctgctccactgtccagcggaagattgtgctgccgccgtgcatggttgacctctgccggggtcataggctgctgggtcagcggttcaagggcttcctctgctgctgcacggctgatggcatccgttcggttctgcacatctgcgatcagctgcatctgttctggcgggaagttaggattcagcagttcttccaactcgccgcctgcttctgccaccgaatagatcacatccatctgctccggggagaaatcctcgtaggccacacccgcattgtgcagagccgtaaagactgtgatttcaaccgcttcttccatcggtacatctgcctgttcatacagatgccgaatgtactccagctgttccgttcggaaaatcggataccgggcttcttttgcaagggtcatgtcctgcaaactgaccgttccatttccaaagtccaccgaatccacacggaactctctatcgtccagttcgatggtggtattaacaggcagatattcctctctgcggaagtatttcgtttgggcatgggttccatcttcctgctggccggacagatagacgttctccccttgcttccagagcttcattgcctgtgaaacccactgttcacgcggaaaaccagatacttcaactttgccgagtgcagttttcttttccaacagtttgctgccaagcagttccgaaacgcgctttgcatcctcgccgtagaactcaaagctgccgtactgctcataaccgaccagcgcatccgggtaacgctctttcagcgcgttatactcgttggcggcatccagtggcaggggctgcaaggtcggctcaacggtcttttcttccgctgcatacggaaccataatgccgcgtacccactgcggagcatccatgctatcctgatacagtgcaacagcatcccgtctgtccgtaataacgtcctgataggtgcgctggaaaatatcttcctgaatccactctccgaagtgcgcccatgtgtcaaatgcctcagaataagcggcatttttcacctcactggaagcaaacaaatcctcaattttctcacggatcagattttccgcttcttcctcggtggtatcgcggtcacgcagcaacggatagatttcgctgcgctctaccttttccaacagcgtgtacagacattctttatagatgctgcggctgtctttctgggtgtggtccgcatccagtttcaggaaatcgttcagcggattcttcgccagcgtttcgctatatgacggtaacggaatgacccggccagccaccgccgaattttccatatctttcagataaacgtcatgagcattggaacgctcaatgcggtacagatggttattgtccaaatacagaaaactgccgttttctctgctgtacatttgcttgggctgattttcaaacgattctactgcttttgcatcttctctcgtttgacgaatgaccgcctttgcatcattcagactgttaaacggccctgtttctgcagcacctgtgcccttttcttcgtcatagttataatggttatagaacttgccatcggaatattgtagaattgcaatatcctcaatatatcccgcctgcatcatcaccgttgactgataccgcgcaacgacttttgccttttgagagttctcaaccgctgcggcggttgactgctctttcgattgcggctcctgctccatgaagtcaaacatggacatctgtccctgttcaggaaccgcaatctcaacagccctcttctttttcgggaaaatcgtgtacgttccctcgacatactggtgcaggatagagagggattctgcctttcgctcatattcttcggaatccagcggcacagacagcagtgcattgtccatctgttccaacagttccaccgcctgttcggggtctgccagcttttcaaccagagcctttcgaccttcttcatggtaaaggtcttgcggataaggccgctccacgtcgttcagcagatggtgatagaatcccatcacccgcattgccatcttctcttgctcataagcaggcatccgggagtagtctgccggcttcaaatactcactgtcacggataagccggtcaattcggcctgcagcctgattccagttcagatgtacgcttgcatccgggttcccgtatgggccacgctccaaagcaatgcccctgccatcgtgatcttcgtgagaatcatctgccccgcaaagggcatggctgctgccgccgatcccgtaatggtctttcagaaagtctgcccgctctttcttatcttcatgatttaagaagaacgaatagattgccagccgactgtctgaataattgctgccccgtgtgaagtaagcattgatttcatcttccgtgatgaacttcttatactcgttccagtgaaagtcctctcttgctgcataattctgatagggtttcgcaaactggtggaacagtgccgccaccttatccggcttataaaagtgcatccgcatcaggtctttatcttcgacgtaggcttctcccagtgcggataatctatcattcaggtccgtcagaaaatccgtatcatccagcaagcctgccagcctgtctgtcagttccgggaaaccgcccctgaagatttctgtatcctgaaacactgcttcggcaacgccatcggccaaatcgcgttccatgtaagccaatgtctgcgcgtgttcctgcaaggcgttctgctgtgcagcatccagaaccgcctgcggagcatactcgccctgccggagcagttcatggatacggttgctgacatcctcccaggataaagacgcattggcaatcgtaccgccctttgccgtgtcacctgccgcaatgcgcaaccccagatcatcgaaccagacggcatactttgcaccgacactctcaaagcctttgccgcccgtgccatattcgtttttcacgaactctgtatattcttccggggttttctcgaccatgaaattgtagatcaagcgcagctgacccttgcttcggttgctgcccgtgcgcaggatttcatcgactacttcggaatcaagtgcaatctcgtccgcataccgcgcccggatcggttcttcgatggcacggatctgctgttccacggtcggcagatcaggcaaagaaaaagcagaggcaatttcttcctctgcttcgctcaaatcctgttccgttgttgtttccgttaattgtacaccaattccttcaagacgatctcctcggccatcgccgtcaggctgttctgatgtgctgcccatgccagcgggtccttttccttgctcggtgccgggaacttctcgttcaggccgtccagcagggtttccatccggttctccgcttcttcctcgatctgcgccagatactggttcagtctgccgctcatcagcatactctgataccagttccttcggttctctttcaggtacgtcctgcgcagcatcccgtacttcccgatggtctgcggctcgtccttcacggccagattcgggaaaagataatctcccttgcggtaatacgtcaactccattttcttgtcctcctttggtcgtattctctttgctttcacgctttagtacgttaaagtccgtattagtattatacaagctgtcaacggatttttcaagctgctgcgtgatttcttttttgtaaattttccgcatctcacggccaatgtcaaaaagaaccgcttcgcactgttcggaaaccgcgttgccaaggaacgacagtaccggcagcttgttgaaatccacgatacggataaagtcatcatcgtccagcacatccataggctcctgcccgcagcggcgggaaagcgtatagaaaatactgttggtcatcagttcccggaagcggacgcggatgttatcttcgtccagttcttccagaaacgtatccgccacctcataggccagaccatccatcgcttcatccagattgtcggcggtcagctgctgtgccaattccatcagggcagtattcatgctgtctgtctgcgacaggccgtaggtgtctgccagatggtctaaaatcgtctgctcatgctcgtagctgtccagattccataagagcggtgttctgccgccgcgcaccagatgggtgtcagcaatatcgaacacataccgcagcttggtacgcggtccggtatcatccagaagcgcgatgccttttgcgccacggttgacccatcggctcattttctgattccagagttccagttctgcgcaggcggttgcatcgggccgctgtgcgtggatcaggagtgtatcggtgaacgaatagcgatacagccgcgccgccacatccagataactcatccagtcctgtggcgagttactgacatacccggcgttctgctgcgccaattctcgaatatcgttaatctgtggcaagggtcaaacctcctttacgttttcgttttcatcggtgttttgggaaattccagactgtactgtgcgcggccttcttcgacgcgcatcacaaggtcagcggcgaatgtcttatcttttttcgcggaataaaagtcttttacatgggtgcggcctttcttcaaaaggtctaccgccatcttcttgtccagcgtttttctcatgttggacaagtatctgctttctttccagagagcaaatttacagttgcgttctgcacaacaaaagctgagtttgctctcatgtacagggtttccgcagaccgggcagcttcctacgcttaccttattatgatggggagtcgccgcgacggtaggaatctgccggaggtcagccagcatcttatcgatcagtccatggatgccctgcataaaatcgtggggcttgatctcgccgcgctccatccgcagcaggtcattttcccactcagctgtcatgatggcggatttcagatagtccgggatattgcggatcgcggccacaccgtcctccgtgggaatcatctgcttacctttgcgctgcacatagccggaggataccagcttttccagaatcgcggcgcgcgttgcaggggttcccagacctttcttctcggtgtccttttcaaattccttgttgcctgcggtttccatggccgacagcagggtatcttcggtgtagactttcggcggtgaagtaaagccctgctttttctctgcccgtaccacaggaagaaccattccctgctccagctttttcggaagcagcacatccttgtccttttccggctccacaaacggaacgggttttgccgtgtatccgggctgcaaaacatccctatattttgccgtgaagttcctgccctggcagcacactgttaccagcacatcctcatagatgaacgacggctgcacagcctgcaccagtttccagatgataagcgaaagaatcttctgtttggtttcggacagctttgccttattacactttgcaccctgcatagtcggcaggagcgcatgatggtctgtgaccttgctgttgttgataacgcagcttacgtctgccgccgcgccatctaaggccagtaccagagattccaccgtcttgcgcatatcctcagtcacaaactggctgtctgttctggggtatgtcaccagcttttcttcatacagttcctgcaatgcctgcaaggtctggctggcggtcagaccgtaatagcggttagcttctcgctgcaaggtcgttaagtcatacagcttcgggggcttcttctccactcgcttgcgctcgatgctgccaaccaccgcgcactgcccatcacaagcaacctgcatagcatccgcatcctgctcctgcgtcatctgttccgataccgctacgacaacacccgcgccggacagttccactttataatagggttcttttacaaagttctggatttttgcctgtcgttcggccagcatcgccagcgtcggggtctgcacacggccaatggtctgttttctgccgtactttttcgtaaaagcgcgggttccgttcatgccgatcagccagtccgcttttgctctgcactcggacgctgcaaacaggttatcataggccgcgccatctctcaggttctcaaagccctgctggatagcggcatcctccatgctgctgatccacagccgcttgatggggagtttacttccggcaagagcatacacacggcggaaaatcgcttcgccctcgcgccctgcgtctgtaggatagttctcggaggtgacttttctgactttgttactcgatggcatccaatgggccgataaagcggtagaaaatctggattttctggacgtattcgccatcgaccttttccgctttggataccagaatcttgtcaatcagctgatgcagaatcttatagttcagttcggtgataccagcgtacttgctgacttcatcaataaaatcctgaatcttgtccagctgatcgtgttcagcacggccttcccgctcgtactgctcaatcttctcggtcagttcagcctgttctttgtcgtagcgatctgcaagcatttgaaaacgtttctccgggagaagtccctttgatacgtcctcataaagttttgcatacaggtcttcgatttctgcgattcgtgctttacactgcttcaaatcccgtttgtgctgcgcccggtcagaggacacccggaggtgcatctgatttgcaatcttcttcacaagggcttcccgattgctcacagcggcctttgcgtgtgcctgaatgtccgcaaagacagcttcatgcagaacacgggcttccaaattatgcgagtcacaggctttcgcaccatatttccgataagtgctgcaacaataaaaggtctgatccagaacactgttacgtttgcgcctgtgctcgaccttgactaacatcgttctgccgcagtctgcacagcggacgatgcctttgaagatattgtcgtagtcggtcttatcgcacataaaactactggaacggctgtaaaggattcgctgcacgttctcccaacggtcttgtgggatgattgcttcatgtgtattcggaacgatagcgcgttcttcaaacggaatataacgccgctttttggatttcatggacacggtgggcttggcttcgtagatgatgtgtccggcgtagactgggctgtgcagaacctgactgatataggcactgtcccaatcatacatcttttcatcatcaataaagcggccaaacatctctttcttgtagtaacacggcttcaagactttttcatcgtggagccgcttggcgatgcggtgaagccccagcccttcctctgccattgaatagatatactcaacaacgggggcggtgttcgggtcgatcacaaggtgattgtggtcggcagggtctttctggtagccaaacggtgcgccgctggagatatactttccgcttttcttgcgtgtccgaagggcactcttgatttttcgggaagtgtctttggcgtacatttcattgatgatgtttcggaacggggcaatatccatctgagattgctcgttggaatcataaccatcgttgattgcaatatagcggacaccgtgttcaggaaagaagatttccatatacgttccggtttcgatgtggttgcgtccaagtcgggactggtctttggtaatgactgatgccacctttccttcccggatatcatccagaagttcctgaaaggcagggcggtcagagttcgtaccgctgtaaccatcatcaacatagaactggcaattcccgaaaccgttgcgtgtggcatactccataagcatcgccttttgagtgcggatgctcaggctttcgctgtttgaaccgtcatcttttgacagtcggcagtataaagcagttacttttttgtccttttccatgtgtacctccataatggaaaagagacctcatcaatcacattgtagcggatgctgcgtgatgatgcaagcccttttccgcagtaaaacgtccaattagccagcggcgagatacgattcggcagttttacgaatttcttcttccgcaagccgctgaaaaagcgtattcatcggcacattgccgatataatggcgttccacgatcaggcgcacggacttcggacttctcggcgcacgtttacgtgtggtgggcttcttctcagatttttctttgttcaagggcagacctcctcattcatgtggtgcaaatacggaaaggaatggatggattctattcgtttttctctttttgttttattacgttggttaggtgaaagttttctttgatacagtctttaaggctgctatactgcataggaaaaatatcttttgcagatgccattaagaatctgcatcacagaatcgtgattttggcggttcttgaatcgtgaaaaacgcagaactattcaacatttggaattttcacaaagatgtgattgggcgaagaaaaccgcgttcgtctacgctcgatcaatcccgcagtgtccaattccttaagcgcactggaaacactgacagtgctgcgccctagctgctcagccaaagagcaaatcgtaaaaatgacaaacacgaaaccgcgttcatctatccagagatttttctgcgagagcgtggcacggtcgagcagcagcgcataagtcatttttgcagtctggctcaggtcaagttccaaaaggaagcgtgggtatgggagaaacggcggcagcggagtttgcgtggtaagatattctgaaatgttgatcacctccagctgaagcagaaatcagaaacaaagagtatgtaacgagaattggtgggttccaattctccagtcgcagaaaagcacgaaacaagtgctcaactgtgttaataagttaaggtctcccatattggtcctcgacttccctaggagtggggaatcgtccggcggcgggcttgcaccgcaccattggcatttcagccaccccgttttcgttatgaccgggctgcgagttacagaagtaccttttgtgaagtaccggacgattgaactattcacttgtcaaggaacatatggaagatttctggactttgacggacgaaaaacatccttctacttggtagccgatgaaaaaggccatttcgtagcattgcaagcaattttgtaaacaaaacgtcataatagtccgagaatggtcttgaaaaagatgccctacacttggtaggcatcgagaacgcctgtttcgtagcattggtgagaaacttgtaattgaattgtaattcttgagaccaaatctccgcttttgaaaaaatcctctcaatagataggcaacgaaaacagcccaaagacaaccatctttttgagaattaacaaaaaggtcacaaatgaccggctttcaaagaggcgcttctactattaacagaaaaagtggcctaaaatggggggtgttggagaaaatttctgccttaaaagtacgcctctactcactagccagcgagaatagccaaaagtcggcaaaaaaacaaatgaattatgtacttctgccactgattgcaacggcatatcggtgacagaaagatcgtttagagcgattcttcgcggtttggggtggtggaaatcgttttgtagttagactttttctgctgaagctgctccagctttttcagcaccgattccttctccggggtcttaccgcccggtgcggaaagctgctgcttattcagcaccatgtcgatatactttcgcacatttttcagtgcggagatatccggctgcaaggtttccagttgggtgcgcagctctgcactgctcgattgcagcgcagaaaattcggcatccaatgccgaaaaatccaccgctgtgctgccgttcagcttcatcagggtgcggacggctttattgaatgcgtccagctcgtccttgtgctgggcagcgtaagcgtccttggtcaacttgaagttcttcttgataaaggtgtcgtggatgggcttcagcttggcatgggcggcggcagcgtccttgatctgggcgattgcccgcatacggttttcgttctgcttcaactgcttgcggagaggggcggcggtctggttcaggttagaaattgcagtgtccaaatcctcgatggtgttcagggaatgggctttcatatagtccaccgcctgtttgacttcctcaaagtcccgaacagtgcatttcagttttgccttgccagaccaatcgctgcgctgctcattgcggagattgaaatagtccatcagaagttcggacagcgtgggttcctttgctttttccagagcatccagaaggagctgcttcttttcgttcaggtctgcaatccagcgttgcagaccacggatggcgctgcggatggactgcatcaggctgttggcggctcgaatgtctcggttgagatttccgagaaaagtttctatcccacgtttttccatctggtgtgcagcgggaccgagatggacggtcggtatctgttggatgccctgccgcttaaaggagcgcaggtcaacacgttccggtctgccagccgcttccagatagcggttggtgatggtttcccagctatgccgccaaacctcggcgtacttctggtcgttccagtccacggtgttttccttgtggcacttccagttcccggaggggagttgaatgcgctcgccgttctcgtcaaggtcgtaaacctttcgggcttttggaagccacttgccgtgttcatccattgcccggagcgtcagtagaatgtgggcgtgtgggtttccatctcccttgtcgtgaatggcaaagtcagcaatcatacccttggaaacaaactgctcctgacagaattcctttatcatggagagatactgttctttcggcacctccaccggaaacgccagcacgatgcgccgggcaagctgggagttccactggttctccacggcttccacggcgttccagagcgtggcacggtctgcatatccgggcggcgcattaggtggcagcatgatttcggcgtggacaagctctttcttcttgttgtagaatttcgttttctggtcgtactcgctgaacagccgttcgccgctctggtaggctgcgccagcaacagcagactgcccttggctgcgttttacgatggaaattttgaagtgcggacacggcataggcatcacccccaaacaaaaagaccgcccagcaagattgctcttgtgaacggtctggaatcgtattcggttgtgctcgccgccttggaacggagtgctgtgcgcttcgatcttgggcggaagccgcaaaaggatagctgcggtagcagcgcaaggaaaatgcagttttccttgggatggaatcgggctggcgcacaaacgccagcttcgatttcatcgagccgtctgcaagaccgcaatttcaccggaacggtgtataattgcgccctttattctaaagggttttggacgttgctgcgttcgtgaacgtcatgcaccatctttgcaagcgccagcacgacttcaggctggcggaacgagattttcagcagttccatcacctgatcatcggtcaattctcccggacagaccagaaaactttccagcattccggcacgagtgcaaagacgatgcacgcgctcttttcggttcagctctgacatctggcgttcaagaattttctctcggtgctgacaagagcgcagcttctgctctgccttggctttttcgctgcggagataggctaggtcggttttgggttgggtcatggcatcacgctcctttacagcattagtgacattcgatatttttgttggttcatggtacactacacataatcaatatggataatctctcgctaaaactgtcataatccattggaaaagtggcgagcgaaaacatggacgctgttacgatcattttcttaaagtaaacagaaagtagagaagtaaatgaaggactctacaaatcgtaggtggaaataaatcggaaaacgtgatatggattgagacagttcaagagaaaggacaatcgacatggatagtcaaaaatttggtacgttcatctcggaattaagaaaggaaaggggggtggacacaactggaacttgcacaaaagctaaatgttacggataaagcagttttaaaatgggagcggggagtttcccatagttaaagataccacaccaaatatgatgaacccacgcttatacactaccagctataataaaccgcaaggacagcaatttgatgatactgctgttctttcttttataaaattgcagtacacataaaaaagctgtaaaatgataaatatatttgtccttgtaacatttcacggacatttgcctgttatactatctgcaaaaagcaaaggaagtgaggatatgaagcagattttaattgtcgaggacgacagttttttgaataagatgttagactataacctgaccgcagacggctacggcgtgacttctgccctaaatgccagaaccgcagccgacgccatccgccagcgggaatttgatttagtgctgctggacatcaacctgccggacggcaacggttttgagctgtgcaagctgataaagccccagcacccggacaccattgtaattttcctgaccgccaacgatcaggagagcgaccagatacggggctatgaagtgggcgcggtggactacatcacaaagccctttgtaatcggggccttgcagcggaagatcaaagccatgttcgccatgctggaacaccacaaaccggctaaggacatttacgatgacgggcggctgtttctggacttctcggagcagacggcttccctaaacggcaagcccctgaccctatccccgatggagtacaaaatgctgaacctgtttcgtaaaaatccccggcaagtgctgacccgtgggcagcttttggaaaagctgtgggatatagacgagaggtttgtagacgaacacaccctgacaacctccatcagccggattcgcagcaagatcgaatccgacggcggcgcaccctacatcaagactgtttacggcatgggctatcaatggacgggaggcgaggcaaaatgaaggttcaaaacctctcggtaaagcggctgtttggccgggtggcaatagggcttgtcctctccatgtccgggatcaccatagtcctgttttttgtgacaaaacagacggcggtgctgctgacaggcggggtgctgctgctgtgcgcccttgtggggattttcgtactgacgcaggcgtttggaaagcggctgtcgcagtttaccgctgacctgtgccagaccttagaccacatgatcgccgggaatgaagcgccccagcgcccagaggacagcgaaacccagcttgccagaattgggcaccgtctggcaaggctctaccagatcatgcaggagaaccgccgccgggtggacgaggaacggcaggagttacagacccttgtatcggatatttcccatcaggtgaaaacgccggtaagcaatctgaaaatggcgacggacaccctgctggaaaagcctatggccgaggcagagcgcaccgactttatccggggaatccgcagccagacggataagctggactttctctttcaggcccttgtgaaaacctcccgtctggaaacaggcgtgatccagttggacaagaaaccgggccgcctctttgataccgtggcacaggccatgagtgggatcgtgtatgcagcggagaaaaaggaaatcgccgtgtccgtggactgcccggaggatttgaccgtttcccatgacagcaagtggacatcggaagccctctttaacctgctggacaatgcggtgaagtacaccccggcaggcgggaaaatcgctgtgtctgtggtgctgtgggaaatgtatgtggaaatcaaagtagccgacaccggcaagggcatttccgaaagcaatcaggccgccatcttccggcgcttctatcgtgaggaagaagtacacgaacagcagggcgtgggcattggcctgtatctggcccgcgagatcgtaacacggcagggcggctatatcaaagtggtttcggagccgggcaagggttcggaattttccattatgttgccgactaaataaagcacacttataacaggagaaaacaccatgaaaaaaatcaatttttgcaaagcaacaacaatcatcttaataatcaatgttattttatctattgttttatttttcgttgttcctgataaaatagcaattcaatgggtaggtacatcccccagcaatgcagtagattcttactatgtatttttggtgccggtattgtcagtgctttttgcttttacgggaaaacctatttttacaatgttcctgtttagattgtggaatagaactaacgagcatttagtgacatacttaaatttgtgtctgcaagttgtatttcttacttgtgaaatctatatcggattatataacctatgtaattttaatgttgccattagtataattctcattgtggaacttatgatagatgtggtgattggattgaaattatttcacaatcaatctatctaaaagattgtgtagtatgattcggcgggcgaccatttccggctgtccgccgtgaattttttgaaatgtccgagcgttgtaacatttcaccccgattttcaatgaaattttttggccgctgtaacatttcgcggacatttgggttttacaatacccttatcaacaaaagtgaggaggcgacgcaatggaactgaccccgacattgattttgaatctggcgctgctgatcgtcccgcccgttgcccttgtgctggtgttccggcaatggctggcccggcacatccgctggacggttgccttgactgctctctgtgatgttctcctattttgggatgaactgttctactatgagagcttcggcctgttcgctgtgctgattctggtgcagttggcggccaccggcgcagcagcgttccgcatttacaacaaacaaaaaaaggattgaattttatgagcattttacagactatcgacctgaaaaagtattacggcacagagccgaacatcacccgcgcccttgacggtgtgaacttctccgtggaggacggcgaatttgtggccgttgtgggaacctccggcagcggcaagtctaccctgcttcacatgatgggcggactggacactcctacttctggcaatgtgattgtccgggacaaagagctgtcaaaaatgaacgatgagcagcttaccatcttccgccgccgcaacatcggctttatcttccagaactataaccttgttccgatcctgaatgtgtatgagaatattgtcctgccggtggagctggacggggacacggtggatcagaagtttttggacgagatcgttcacctgctggggctggaagataaactgaaaaatatgccgaacaatctttccggcggccagcagcagcgtgtggctatcgcacgcgccttgattaccaaaccggctatcgtgctggccgacgagccgaccggcaaccttgacagcaagaccagcgccgaggtgctggggcttatcaagcgtaccagttcggaattccggcaaactgtcgtgatgattacccacaacaacgacattgcccgccttgcagatcggattgtccgcattgaggacggcaagattgtggagtaaggaggtggcaggctatgacatggccttttgaaaatgataccagcgccatagtaaagcgcatatcaaaccgcagtatatcggcaaatcgaaaaagaaatatctttattgttttgacgattgcacttgccagcgcattgctatctgctattgtcctctatggctttggggttatgcaggaaacgcagaaccgcaaccaaaaaacagcgcagattatgtatcatgcgatttctgaacaacagggacaggaactatacaagcaagaagaaattgcgtgggttggggaattttttaacgcattttctgaacaggtaaaccattcaaccgtgaattttacttatgcaaatgcagatatgctaaaatcccaaagtatgccctattcgggagatttaccagcttcggagaatgaaattgtagtgcaagaatcctttttggatagtttgggctattcaaatgaattgggacagacaattcaaatccccttttctgacggcactacccatgatttcaaattgacgggaatcttagatgtgaaaaccggcgatattgggcgctatacagccattatatcgaaagaattagtaagacagcagtatggcgacgagggcatgattgattattacattgggctgaaaggcgctcaaaatatgagcgaggaagaagccaccaactatgcaaacactctggcacaggaattagaaatttccgatgatagtgtgattgtccgttccacatattttaacttaaaggacgaaaatcacggaagcgatatgctgttctatttcttgatcggttttgtaactttcattggttccggcattgtgatctattcgattttttatatttcagtagcaagcagtatccgtaactatggacagcttcgcacaatcggaactacaaaacgacagatcaaaaagatggtttaccgcgagggaaaattacttgctgccattgctatcccgattggtctggttattggaaatgtgattgggtacttcctgattcctgccggttggtactggctgactactttatgtgtgacggccggggttggcctttttgcatttattattgtgatgattgccattcatactcctgtaaaaagagctgcggcagtatctccgctggaagcattgcgatattccgattatcaggggaagatgaaagaaagttccgtgttgcaccgtaaaataacgcctgcttcacttgctaaaatgaatctgtccagacaaaaggcaaagtccactttaacaatactttctctttcactcggcggagtattggttgtattgatttcgacaatgttagtttcctatgatggcgttgcagaggcaagaggcagggctttccctgtcggtgaatttaacattcagctcaacgcaaatcaatcgtgggacactgctggtatttctttgtctggattgcagcaaaagaattttctaaatgccgattttgtaaatgcagtagaatctattgatggggttacaggaatcaagcgctggtattacacggacgcagaatatcgtgtaaatggtaattctggaaaatggattcagggcttttgccgagatgaacagcagaatttggagaaagagcgaattgcgggaacgactgattatgatgaactggtggcaggcaatggaattgtcttgcttcaagagcgtgccgatctctatgatattgaggccgcgttgggtgataccgtcgaagtggactataaaaccgaatccggccaaattcgctcaaagacctataccgtcatgggcattgtaaacgaatattcttactccggcttctcaaaatgctttgcgcttccggagcagtttatgaatgaagcgaccgggatagattgcacaggtacgatttccgtaattaccgatatggaaaaatatgatacggttgaagctgcattaaatcaactgatagacggaaatagcgatttggttatggaaaccataaaagaaagtatcacttattatagcggacttcaacaactttctttcggagtattgttgatcgtggctgttattgtcgtgtgcttttctttaatcaaccttgtcaatacgacaatcacaaactttctgtcccgcaggcaggaaattggaatgttacaggcgattggtttgagtaaaaagcagcttatcaaaatgctgtgctatgaggggttgatgtattcagtttttgctacgctggtaacattggttttagggactggactgggcttcctatccgtacaggtagttgtgaaaacgatgaatccatactttcactattcatttccgtggctgatcgtattgatatatttagcaatcctgctgattgtgcaattcaccttgatttcttacacaactggaaatctgaaaaagcaatctcttgttgagcaaatcaggacgatggaatagccgtatgggatcggcggggcggcgtgtgctgccccgcttttttcgccatttctcaaaaaatttttgaaatgtccgagcgttgtaacaattcagcctgtttttctgtcgaaatcaaaggcacctcggacatttatagttcttccaaaagtttgatgataatattaccattcatggaagaagcaatctgttattacaataatgcgaaattgacgatagtgccatcattaaattgggcttccacccggttggtgtccatgttgtagcggcaggaaagcgctttttgagagtgattatggtcgaaatactgatttcgtttcatttgaattgctccttaaatgatttttggatttgattttcaacgatatgaggtctctttttcctttctcttaagtcacccaaccgcactgtcctgcatcgcaggcgttcaccacataatcaaatttcttgctgcggagcagtttgcgcaggacattgaactgcggcttctttgtattgtgtaccagcagtttccactcggcagggagaatcggcaaatcctcaaaacgccagttttcatagcgttcatcgtaatgttccggggctgcatactctgccagatgccccagacaccagctgaccacgcaatccccaccctccagatacccgtcctcctgccgatatgcaccgatcacttttgcaatggatttcgatacactcggtttttctgcaatcaccagatatttcaaagatttctcctttcctatgaaaaaagcagggatagcctttcgactacccctgcccccttatctcacggttttactcctgctggctgtcctcgttcacagtcgcaaggctctggtcggtttccagattttcactctgcggcgtttcttctttcggcttcggcttataaatgtagaagtagaagaaagcacctgcgccacccagcgcagccacgaataccagcagcagaatcttattcatgccgccgctcgattcttctttcggttcttcgatttccacatccggggtaggttcaggtttggtttcgggcagaactactgcaggcgtttcttcttcctgcttgccgttccgctcttcatcatccagaaactcctgcaaatcgtactcgtcgatcatcgagagcatatagacgttttcgctgttccgcgcccggtcgataaccagaaagaacgtgttgccgcccttggtcttgaccgtgaagaactccttgctggggtcgtccacgatgttgtccttcacctcgccgttgcctgcgatggtgaacggaatcttttcttcctccgtcggctctgcttcctcgatcacctgcacaggttcctccgtcaccgcagtggtgtccacaaaggcaaaggccggagtcgaaaagcccaccgccatcagcagggtcagaattgtgctggggataacaactcccagccgtttaagcatttttttcaatcgtttcctccgtttctgcttcctccgaagcgttgtttacagcggtcaggaacgtcacgttgcccgcctgaatgttgtccagcagagccagcagttcgcgcccgcccatcttggtgctgcggatggcacggatgatctcgctgtcctcttcctttttctgtgctgcccggatggttctcagccgttcttccagttccgcgatctgctgttccgtcttttcggcttcatccagatatttctgtaattttttgcccatcggccctcctttcagttgatgcggccaaagcctaaaaagtggctttgccagtaggtcgaattgatgctggtataggaaatggggtcgccgcagtggatcatcatgccattgccgacgtagattccaacatgcgacgcgccaacggtgttataggttttctcgaagaagatcaggtcgccgggctgtgcatccgcaggagaaacatagctgcacttcccgcgcaggccgttggctgttgtacgcccaacgctccacccattgccgcagttattgatgacccagcatacgaagccggaacagtcaaaactggtgcttggggaactgccgccccacacatacggcataccgagatatttttcggcttcctcaatcatccttgcgaacttttcatccgaaagggcttccgaaggaatgtcgtacttgaagccaccgccggaaccaccagcaccaccacctgtgccgatactgcccgttgtgccgccgctgtaagtcggtgagcctgcgccgaacagttcggggcggttgccgtaggtcaggttgtaggcatcgtatcgcccagtctgcttcttgttcatgttcttccgcgcgatggtatcaaagcccctatttttcagcaggacattgaggattttatactcgtactccacttcttcctgataagtataggtttccatgctgatgtttccaaaagcgtcaatcattggacgaacccctactctggtttccatgcgagtgcgaatctcaatggtttcccacactttcaggagatactgctgcttgaacagttccttgataacaggtttgacctgtcctctggtgaactgctcatagaccgcagtcagatgggaaatcagctgatacgggtcatgcccgatttcgtcaagttgatagcggtattcatcatagcccggatgggtggattccatctgccgaatctgcttatccagttctttttccagttccagataatcttcttccgcacctttcatgtcggcatccttgctgggatatgtcgttcccacaaaggtactgcctgttccctgaattgctgcaccgcagcttgaaaaggctcccagcatgaccatcaccagaaggatgccaacaccaatactgacccacagggttttattctgcacgacgatctcctgcaccgccgctttcgctttctccgtaatggtgtttgttgccgctgctgcctgcttgctggcggcagttccggctttctggccgcgcttggcggctgcataagcatctttatactgctttttctggtaaaacttcgcaccgactgtttttgcttcacctcctgcggcagtcggtggcggctggggctgtttctttttcagctgcggttctgctgcattttctgccgtaccgccctcgctctcggagaatttcagacggctggatttctgatcctccccacctcttttctccgctctggcagatttgtctttgggcttttttctgcctttgacaaagtggtgcaggcgttcggcggcttcttccgacttatgtgcagcttccacgccggaattgtccttttctacctgatgtactttctgatgggcgaacccggtggcggtatccactcctttcttggccaccttcttaacgcccatccctacgcctcggacaatgctgcctttttcatcctcaaaagaaagtcggcctttctttgttggcggctctgcatccgatttcgcagacgcatctttcggcttaccatcctcctgatgcgctttataatagtctgcgctctgcttggcggtactgtgatgccggggtggttcctctttcccatcctcggcatccatacagatttcttcgtccatgacaggttctttgtctgtttccttttccgcagtttcttttgccgaatcttcctgctccggcttttctgctgcggttgcggacttctgttccccggtgcggaggttttcatccaccagaccatccttggtcattttctggacgattttatctctgccccggaactttttgtctgctatggaaatcacctccttccggctggaaccgtcacgcgatcagagctgcgtgggtttcccacttgtcaagcacctgttccagcttccgggcaaaggcgatcagacgggcattcacttcctcacggtcaagataaccgtgggcttccatgtgaaagccgtcagtcagttcatcggccagtgtgccaacggcgtaaaagtcctccagcaccgtatgcactaccgattcttcatcgtggaagttgagcggctccacctcatcgaaaggcgggccggaatcactttcgtgcggctccatgtcagagtgatgatgaatcttacggctcagtcggtcaaaaatgttcggtgtgttcatgcttctttcttctccttgtattttcccatctcattgggcttggtggtcatcaggccatacagtttcagcgatgtatcgaacttatccttaaacgggataatcgtgttgccgtagaacagcagcccctcgccctcgttgctgttcgtcacatacgacagctggaacggcgaaatattcaactgcttggcaaggatttgccggtcgccggatgcctggttgagcatataaatgaaatcgctgttctcgaagatgttttcgatttctcggctggccagcaaatccttgatgttctgcgtaattcctgtcggtacaccgccccattttcggaaccgcttccagatttcgacgctgtatgcagcggtctgttcctctttcagcaggaggtggaactcgtctatatagtaccgggtattctttttactgttgcggttgatggtaacgcggttccagacctgatcctggacgatgagcatacccagttttttcagctgtttgcccaactccttgatgtcgaaacaaatgatgcggttatcaagttccacattcgtctgatggttgaacacacgcagcgaaccattgacgtagatttccagagccgtggcgatacgctgcgcctgccgctctttctgttcccgcaggcagtcgtacagatcaccgagcgtcggcatattctccggcttcggatcgtttagatacttctggtataccagtggcaggcagcggtcaatgaccgacttttcttccggctccatgccatcccgtgcgcccatgataagttcgcacagggaaagaatgaagtccgatttcatgcccagcgggttatcatcgtccgcatagttcaggttgatgtccatcgggttgatgtagtccttactggtggacgagatatggataacctgaccgcccaacgcttccaccagcggataatactcgccctccgggtctgccacgataatatcgtccgttgtggtaaagaacacgttggtgatctcacgctttgcactaaacgacttaccgcttcccggtgtgccgaggatcaggccgttcgggtttttcagctgcttccggtctgccataatcatgttgttggacactgcgttcagaccataatagagggaatcgccctccataaaaagctcctgcgtggtgaagggaacgaagatggcagtagaagtggtggtcagtgcgcgcttgatgggaacgagattatttgccagcggcaggctgctcataaggccctgttcctgcaaataatccagacggttcagagtgcagttgaacttctgagcgatgccagcagtctgaaacacagcactatccaactcctgcttggtcttggctgtattgaggaacagcaccgtaacaaggaacatacgctcattgcggctttgcagatcatccagaatcttcttggcctcgccaccataagttgcaaggtcgctcggaataatttccatatcataaccagacctcacagctttcttctgctcctcgattttcatacggtccaggtcggtaattttgcctttgatcagtttgatggctttcagctggtctaccgactgcacatggatactgacgaccagatttttgtccatgtccagaaactcagccagtaccttatccgtcagttctggggcaaggatgttcagataggatgcagcaccataggtgtcccccatcataaagtccttgccgcttttgaacaggaaactggtcggtgcaatgaagtccttggtggtcatgccgctctgcagtatgcggtcatagctgaaatcgaacttctgctgttcctcctgatgaaaggtttcgtacatgatctgaagccgctccacgccgttcagtggataggctttcacgcccagcaccttgaaattattgagaatatcggtttcgatacgctccagccggggttttgcctcccggacactctttgcttcgatgctgaacgtgatgtacttcgtccgaaccagaccgttattgcctttggcaagctgctgtttcagcatctgcgcatattccatacgcacatcatcgaactggtcgtgctgcggctcgatctggatgaccttgttgtactcgctcatatcgctcttgtggttgatgaacgacaactgaaagcggatactggcatcgaagtagttgaggaagtcgcaccagctttcaaagatggtgttcttatcctcgttctgtgccagctggtagttaatgtcgtagaatcggacggttttggaatacagatgttcctccacccggcagataccgtcgcgccccatttccagatatggaatggaacgctgcacagtcaaccgctgttctttctggttcttttcggatttccgaaagaacctctggaagaagccgcccgactgcggtttcttcttcggttcactttttaccaaggatgcctcctttcttctggatcggtgctgcggtttccagttcccgctcatacaggttttcgacctcatagcggcgtaccgcaggacgtttgaatcggacgctgatgaagtttgtcaggatggtttcaaggtgcatcccgtttttctcatacagcgcaaagaaaaactccggcagcatcaggagcaccatgcctgccgccgcattgctggttcccagcgtaccgcgcatgagaaaatagaacggaacgccgatgcccgccgcgaaacccatacacactagctggcgtttcgtcaggttcagaaagaccttattcttcactttggaaaggtctttgggaatcgtcacataggccatttatcgccagaacagccagaccgccgccgggaaacggcgttgtctgctgccttttcctttcgttggattttcccggttttagtgactgccgaagatctgtttggacagacttcccgttttgagcagcgagaagcaaagaatcaccgtgtaggccattgtgccgaacagtgccgagtgaatatccgaagatacccggatgctgccgataagggctgcatagattgccacgcagaccatcatcaggaacgcctggaatgccagcgcgaacagccctcggaagtagtttgtacccacatggccccattcacggttactcatggttgcaaacggaatcggagcaagcgaagtgtagaggtatatttctatcattctgccgtacattatcactgtgataaccactgacagaattttcagacaccagcttacaacaagggtttccaatgccagcgtcaccagttcgccaatcgccattgttgccattgccgcctgcatctgcatggaaagagaactaatatcaatggcggtattgccacggataatgccagaggaagaatttaccaccgactgtccaatgtcaaataccgccattgcaatatcgaacgtatggctgacgagatagaccgcgatccacatcttcacgaaatacttgaagaacatccatgtgtctacatcgtgcagattgttccgttccgtcagcatcgaaatcagttcgtagcagaggatcagcgtgatgatgattcccgcaatcggaatcaccaccgaatccgaaatgttacggatcatgctgaaaatactgctgttccacccttgcggtgtctgcccgacctgagcagcgatttcactggtctgttggttgaccgctgtgaacatcgtactcaggttggactccaccatgccggaaagaagttccctcatccatttttcgattgctgcgaaaatattatcgaacaatggcgggttttcctcctatcgcttgttgattagccgaacagaccagagagcagcgggatcagctgggtgccgatgaggatgacaccgccgccagccatgagctgcttaatgccctggctttttgcttatgtgtgataaagaagtaatagaagtgtaaaaaattttgccgttcctatccggcacatgaggtatgtcggataggtcgggcggttaggtgtcgggcagttctaccttgccgacaaaagaataatagatttcgatttcctgtctgcgtaacttgccccggcgtttcccgtcaagggcaacgctttcatggacaacgattttctccacaaactcccgcagcagagtaggggtaagttcttcaatggtagtgtgcctgcgtaccacattcataaacttttcagcgtttgcggtggcttcctgcgctttggaaagttcttcccgcagtctggcggcacgttctttcagttctttctgctcggcttcatagtctgccgacagctctgtgaaacgctcgtccgatatgcgcccggttacgctgtcctcatacagccgcttgaagatagcagataactcggctatgcgtttctcggcggcttccagctcctttttcttggcggcgttcctgcgtctgtccccgtcctcattctgctcgattaaaagcttcataaaccgggcttcatgctttgccgcatagctggtaactttccgcagattggagagtacgccagcggtcaagaggtcagtgcggataaagtgcgctgtgcagtcggcggtgcgtttcttgtagcttccgcagatataacagtcctgcttgcgcttgtccgtctggtatcgctgctggtacatgacgctgccgcagtcggcacaaaagagtatgccggagaacaagcccacttcgtcataacggttggggcgtttgcgctgcttgcgtaactcctgcacccgttcccacgtttcccggtcaatgataggctcatggtggttctcaaaaaccgcctgcttttccgggggattttctatgctgtgtttcagcttgtaggacggcttctcggtcttaaagtttaccagacagcccgtatattcccggttttccagcagatgaaccacggtattggtcgcccacttgcactcatagccggggtggtagcggcgggtgctgcccgtcctgcggtattccagcgtccccggcgtggggatttgctgctcggtcagcatacgggctatcttggtcggaccgttcccggcaaggcaaaggctgtaaatctgccgtaccaccggggcggcttcctcgtcaatgataaagttttcgtcctcgtccatgaggtagccatagacgggcttgcttgtgatgggctttccgctcatgcccttagagcgttttactgccttgattttcttgctcgtatctctcaccagccattcgttaaaaatgttccgcagcggggcaaaatcattttccccctgtgcgctgtccactccgtcattgatagcgatgaagcggacacctttctgtgggaaaatcatttctgtgtacattcccacctgtaagtagtttcgccctaacctcgacatatccttgacgataactgtcccgactttccctgcttcaatgtctgcaagcatggcttgaaatccgggtctttgaaagttcgcaccggaataaccgtcgtcggtgtaccagcgcagattagaaaatccattctgtttggcataggtttccaaaatcctcttttggttggaaatggaattgctctcgccttgcagctcgtcctcatgggacagtcttgggtaaagggcggtaatgagttgctgggtggtctgtcttaacataaattcctccgtttccgacagccagccccactattccgtaccttgattgtaccacatggggcggctgtctgtatagcggcaaaagcgtcaaatctgcttctttacggtcggtaaaaatgacggtttttcaatcaggcttatcacaggtcaaatatccggcggcggcttctgcttccagcactttcatcatcttgtcagcggcggtgtcggtcgccccctccttgaaaaagccagacaccacaaggattgtgttgcctatcctcgtttcggtcacgcagtccgggcggcgggcagggcgtttgtttctctgggtgtcggtcataggcaaatctcctttccggcaagcagccgtttcagctgttccatttttccctgtgcggcggctttcctcaaattctccccggtaaagcagagaggggaacacatttcaagcaggcggtcataaatccgggcgtgggcggtgtcctccgggtgctgcaattcctccagcgtgaggttggtcgtcacaatcagcggcttcctgctccggtagcggctgtcaatcacattgtagacctgttccagaccgtattctgtgccacgctccattccaaaatcgtcaatgatgagcagggggaagctgcaaaggcgggaaatatattcgttcctgcccgcaaagctggcggcaaggtcgtttaatattgctgcaaagtttgtcatgcacaccgggacttcctgctccatgagggcgtttgcaatacacccggcaaaatagcttttcccagtgcctaccctgccccacaagagcagcccgtagttcccgtcctttatctgttcccagcgtgccacatatccggcggcgttcttcatctgcgggcagctgccgttatcgttggcaaatgtccagtcctgcatggtcttgtctgtaaagccctgccgtttcagccgttccaccgtttcaaggtggctgcgccgcttctcggcggcttcccgttccttacgggctgcccgctggcagtcgcactctgacgggtggcggtcacgcccgaaaaaggtcttgccctccgggaaataggcttctttgggtttccggcatttgccgcagtataaaagcccgtcctccccggtgtaatcctccggctcggctgtggtgtcggtcataggcagtatggtgttgtggattgtatcggtcataggctttctccctccttgaatgaatagtccggtatgcctttctttggcttctctttggcagcgtcctcctgcgcccacttgtaaatggtggctgcatggctctggtactgcttcccggtggaagcgatgtggcaggaaaggcggtcaaggtaatactcccacttgccggggaagtcctgttccagctccaaaagttctgtgtcagaaagaaatacatttttatatctgccataagcggcggggggctgcccctcactcgctccttttgtttggctctctattaggttgtttatattagtttggttaggggacggttttccgaccgtcataaggtcagttttccggctgtcagttggtcggtttcccgcccttatgaggggcggttttccgtccgtcagttggtcggaaaactgtaccactgggataggcggcactttcacatacagacggttggcggcagaaaagcccgtccgtctgcgttccagcagcccggcagcgtccagttcgttcagtgcgccctttatggtggtgcagcctttatccagcatttccgctatctctgctatggggtagacaatgtatgtccgtccctcgctgtcctgccagccgttcttctgcgaaagggtggaacggtctaacagcagcgcatataactctcttgcggtgtgggataggtctgtttccagcaggaaacgggggtaaggcaggtaagcgggcagctccgttcctgcggtcatataatcagcgatagggttcacctccttgtggtgtctgtctgtgggttctgttacgcttttagggggcgtttttaagggaaaaggataaatgtatcacgcaccctttgacaccctccaaaaaagccttgatttatgcgggtttgaaatgccctaaagcgtgacatttctccctttgtttccgcttccgtttggcggcgtttatccgcttcatgcgtccggcgcagtccgggcagtatttcccccggttggattttgggaagaagaacgccccgcagacagcgcagcgtttccggcttccccggcgcaagagggcggcttccagtgcttcatcaaggggcaggacagcggcggtaaaccagcggcagagcagcgaatagctgatactctgtacacacacgcaaggctcgccgtcctccaacagcaggcagttcccgctgtcatagttgcagcactcatgcacaaggcggcgggctgcccggtactggcggtagtccatgcgggggatattaccgttcatggctctgctcctttctgcgctgcggctcgctccggcgtaaaatctggtcgatattgcccttgacagtctgcaagcggcggtactcctcccgttttgcccggtaatcgttgtagccgctgtttttctctttgataaggctttcaatctctgcttgcagggatttatagctcggcagcttggaaatgccgttctccctgaaatagcgggcggctgcgtctgctatgataaagtcactttcatgcttctgacggtaggctgcttttgctttggcgtttttctgctgtttcagcccgtcccggacagggcgggtcttggaataggcaagcacctgccgttgcagctcctttttcccgttcagcgtcttttccacctgcttcaaccacgcaaggctttcctgcatggcggcataggcggcagaacaggcttcgtccagttcctccggggaggaaaagccgtactgctgataggcggtaacggtagctgccatttgctttaggttgtgctttgccgcccagcggtcatagcccacgcccttgccctcggctcgcttggcttcccggtcaaccatgcgctgcaaggtgttgtctgccggggtggtttttgcagctttttccccttgtaacggctttttaactgcggcagggtattcgggtatggctttggtctgttcggcagctctgtgggcgttctgcgtgagcagggcaaggacagcagccttgtcaaaatcgtcccccagctttcgggctgtgataggctttgtcctgtccggcgtgaggtaggaaagccgcccccggctctccttgacggtcacaccctcccgcagcaaaagggaagaaaactcgtcaaagctgccagcttgggaaagtgcctgccgtatcgtccggcgcagcttcgccttgtccgtttcaaacttggtgggcttggtcggctgtccggcggcttctctggcggcgttctctttgtcaagggcaagctgccctttctttgccgcccagtattcccgttcggttatccgttccttgctgccgttcaagaggtcgatttggtaaagcccctcccggtggcacatttccatgacttcgctcttgaaatattccatagcggcgttggtgcagcggtgcttgcagccctccagcgtgtcggctggtctgtccatgtagggcagaagcgggacttcgtaaatccgcagggagttgatgacgatatgcacatggatattcccgctgtggttatgcccgtccgggtgggtgcagattagggcttggtgtccggggaaatgctccttgcagaactgctcgcccagctcctgcgcccggtctacggtcaagccgttgtctgtcccgtcccgtgggtcaaagctgatgatatagtggtggcttttcacatcttcccgtttttggtttttctcatagcggagattggctcgcatacaggcaacagcgaaatcctcgcccccgcagttgagggaagaaatgcggtaatcctccctcggtatcagccgcccgttttcatcaagggtggctttcatggtaaactcgtcatgctcaaatgtgagataggcttccgctgcgccatagtcggcgtttttagagctgatatgtttgaatgttgccaacagcgtcacccactttctgcaagacttcaaactttagggcagcaaggtcggaaaccgccgcccgtacctccccggcaagctgcggatagggactgtgccactcgttcagcgtccgggctatctggtttaagttgccgccgatcctcccgtattcggcggtcagcttcccgacagcggcaagcagctcgtcattgatgggggaaacggttatgatggggcgtatggctgccccggttatggcttgccggataaactcggcttggctcatgtggtaagcagaaagccgctgggcaaactcggcgtattcttcctcggtcatgcgtgttttgactacccggctgcggtgcggcgtgttgtatcgtttcataggtggttgacctcctttctgtgcgtggtgtcctctcactaataggagaaaaacagggtgtgaagcggaactgtttttgaaaaatccgaaaaatattttgaggggtttttcagcggcgcaagccgcataagcagggtttggggaaggcactccccaacaagattcccgcaggggcaaaatgagcgataagcgaattttggcacctcggtagaatcttgctctaagaaactgccggcctgccgttcacttgctactgccactttttcagaaaatctataaccagctttttttataaaaggctgcgggctggcgtttttcccttactccctacaaaccacaaaagagcagaatggacggactttccggcaagaacttttccggcggctcggtctttcccgacaataaggcgtttcggaagctgcgttttgcccgctgtctgaaaaaaatggcagccttttttggtttcactgtctaatacggaacttttggaaatttgccaaaaatggacgcaaaaaaagcagcaaatctttttcggatttactgcttcatgtgccgctgcggtgcggcgggatggatattcagttgaaataaaagaggatggtggtactttagtctatcgactctttactaactattaggtaatcttgaaagattttccttgaatttatctaaagaatgttcattgtttcccgcaaaaataagtggaattgtatattcatatgatatgccattttcatagtccgataattgtatttttatagtatcatccctctcatctttaggtgctatatatatgaatgaatttttatttatatcagatattttccctttttcagaagaaacagtataaccccagtctgttaaatttgtctttattgtaacttctgtttctgtttcttttctagtctgcaatgctgttttatcgatttggatatcaaaaggagtcgaacctaacaattcactgtttatatttacaagttcttctccatttgttttagaaatattagattcatcttcataattttgttgagattcatcttttggtgtttctctgttacatcctaataaaaagcataaaataattagtactaatacagaaagttgttttttttgcatttatttctcctttcatattatcaaagaaagcactgagagtactttcaagaaattttgaaatattctcaatgctttctattttttgattataaacttgccggtaatgatactatgttaatttatctctttcgcgtaacctttgttgcaatatacacatgcaccattcacccatttgtgagacatttcaatcgtctcaacttcataaatgcttacttctccacaaattaaacattgtttgtaattatatacatgacgtgtcgcacatttatcccagtcatcatatataccaggcatttcatcttcatatccatagtactggggagaaccccaactatgagtatgagcggcaaatacagtcattggagcagctacaattccagctactactgaaagtgctaaaatagattttcttaaattcataagttcctccctttccttaaaaatacatagctctttgttacattgtcattttaacataataattggtaaaatgcaataatttattttctaagttagcaaccaccagttcaactggtggtttattattagccctccaaagggctattgttactgctcgccccaaagggcggtatcgcaagcacttttgctggcccgctataaagcggtactactcgaatcttctcgtctcgattcttctgcttgctcttttatatacttttgaactgcttcatctgttatattgccaatcgtttcaacataatatcctctagcccaaaacgctttatcccatttactttgcagctcaggatgcctgtcataaatcattaatgtgctttttcctttcagataccccataaaatctgatactctgagttttggtggaattgctacgcttaaatgtacatgatctatacataccgctcctgctattatctctacatttttatactggcataaagttgctattatctctcggacatctctgcgtattctcccatacaataccttctttcggtatttaggaataaacacaatgtgatactggcatttccaacgagtatgtgataaacttttattgtccatttgaaccgcctcctttgattttgagtttggcttgcgacaccattctcattctatcacaggaggctttattttgttatcctcaccacttccgactactctattctccccagcatagctgggggattagacttttcatttacgagaaaatactgtgcatattatcttatttaggaatagttaaggcggctacctaaatctttttattactttaccgcacatgagcatttgcgccggggttgtcgttaccatatccttccatgaggttcacaacgccccaaacaccaaggcccgcgccgatggcaacaacgagagtctgcagaacggtaatagcctgattgaagaattccatagtcgtttttcgccagattgcagcattgataaaaagtacgattccaaaagaaaaacaggctggcacatcttcggtgctacctgtttcctgcaattctggcttctcctttcattttcataaaaatcagccttttgaaatcgcaaaaaatgtagagatcagtcggacgaggttgctgtcatggggtctgcccggacaggcgggcggatgaatttacttcggataatgacctccttcctatgctgtgctttcttcggacacatccacctcgtagcaatcaaattcttcatccatccgcagccttagttcgtgcttcaggtagcgttccacatcgaaagcgttcttcttatcaaagtccgacagttctttgtaccgcttatgcttggtaatgtcgaatttgtcgctcaggaatggcctgactccgcgcagctgcaggatgcacttgctgccgtccatgacagaaagctcatcccggctcataagctctttcccggtcttttggtaggttgtaccaaaggatgggctttgaccgcgcgtgtcagaagtgttatataggtcgattgtttctttccccagcgtttcggaaatctctttgagtgtcgagctttccttgccgccgaggaacagcatggtatcgcagttgccgatgatggtttctgcggcatccttgtagatggttttcaactggctctgcgactgcaggatgatggatgccgaaatctcgcggctgcggatggtggcgatcagtttgtcgaacttcggaatcaacccgatgtttgcgaactcatcgagcagcagccgcacatgatactttagctgacctccgcattgatcgtctgcacggtcacaaagcagattgaaaagctgggtgtacatgatggacaccacgaaattgaacgtatcgtccgtgtcggaaatgataacgaacaaggccgtgcggcgatctcccagcaaatccaattccatttcatcgtaggccataaggtcacgcagttccgcaatatcaaatggggctaatctggcaccgcaggaaataaggatggacttggccgttttgccagagacgaaaagtcaaggactttttcatcaaattcacaaagaagtcacattttgcggacttcctcacgaagcatacgcttgattttgtcctccatcgtctctttggcggtctggctgaaatgcacacggacgatataggtggtcttgccgatctgctttctgacagtcgggcaaggggcggtgttggttgcggtattgttcattcaaaatcctcctgtaaataaaaaatgcccggtgacttttcatcatcgggcggtgatcggtatgagggaagaaggcaaggcggcaacattaaggtatctataaaaaccttgccgtctttgccacgcttgccgtgttcctgctgtcagtctcggagatagcagacccatgctgtgccgtctttctcggtcacaagtctgtccccgatacggctctttgccgttctcatggtgcgtgaggaaatcccacgctcattgactgccttttccaactctgcactcggcatacgctttccgtccgcaagcagttccagaataagcatttgcgcctgtgcggtcttgctctcggtcttggcggtgtctgttccggcaagaagctcgtcagcggtaatgtcataagctcctatccattcaaagcctttctcgtctcccagagaaaaggcaagggactgtccgggcggcgcaagggagcttttctcatggatcagcaccctcgttgtggggctgtccttcagcttgccgataaaaagcagactgcggactgccgccgtaatgtcgatagaccccaatccacggtaggtgctttgcgttcctgcggctttgttcaggtgtccgatcagcacgatagcgcacccggtagcctgtgcaatgtctcccagactgcggaatatcgggcgcacctcgtttgcccggttcatgtccacatctgcgcccagaaacgcctgtaccgggtcaatgataacaagccttgcgttgttctcacggattgcccttgctatgcgctcatcggcaagggtcagcggtgtgtccctatcgtcaatgacaagcactctttcaaggtctgcttccgcttccatcagccggggcttaacggtatcgcccagaccgtcctcggcggtttgatagatgatattaaaaggctcaagggtctccataccgggtaaaggctttcgattggtgcaagccgccgcaaggcgcatagcaaagtaggtcttgccctcgccggggttgccctgtatgatggtcagctttccaaatgggatatacggaaaccatagccaatccacgctcgtcagctccacatctgccatacggagcatggggacaggctgggcggtgggcaactctcgcagcgtgattgtctcggctatgaatttgcggctgggaatgtccccttgctgacggagaacatcgttccagtctttccttgccgggacaaggcgaatgacggcgatctcgccgggaatggactgtgccagtcgggtacaggcttcgcttcctgcggtgtcgctgtcaaggcagaggaacacttttcgggtgtccttgcgttcagaaaggaaacggtcaagggctttgcccgaaacgccgcccagggcaagataatttcttgtctgccaatcctgcggataaaggcagataaaggacaaaaggtctatcggtgcttcaaagacaaagagctggttgccgttgccctcatagcggaacggataggacttgtcagacccggcaatgtcctgtctgaatgggtctgccgttcctcgcacatgggcgtatctcggcgtaccgcttcggtctctgccgacaaacacaacattgtgccactttgcgtcctcgtaaatatccccggaaagaagaaaagcctcaacaagcgttttgttgagacctcggctttcgcaaagatattgaattgctctgtcggctgttctgttgtgcaagggcaagtgaaacgctgtgggcggtgttgtgctggcttcgctctgtccctcaccgctttcgccggttaagagctggacagcttcgggaaaggacttgccgtaaaactccatgacaaaatcaatgggatagccgcccttgctccggctgtggcgaaaccacttgtttccccggacggtcaggctgtcatgttctttccagcggtattcccgtccgcttttgataagcgtctctccctgtgtgcggagaaaatcttccagactgacggcgtttgcccggtcgatctgtgcttgggtgtactgcatgggcgtcctccttacttcttgaaaacagcgcatcgtctgcaaatgccatgctcacgctcgtccagcgtgtaggggcagttcgcacattcctcgccgtactgtctcatgataacaggcagatagcccagctcctgcaacatatcaatctggcggtcggtgagggtggcttcaaaggcaaggcatttccgggtgtgttcgtccagctcgatcaggtcggaaagcggtctgccatcggtcaaagcttctccgctcaaaaggcgttttgccgttctgcggatggggttgtactcgttcttccagtcgtattttttcatcgtgtcatattctcctttttgtgtcgtgtttggggtcgattttggagcatttgttcctctgtacgctcgttaaatcgggcggcagtatctacacatgacttgaccttccaaagacggtgtaaatcgtctctgacggtcttaaactcgccataggtggtgttgtgcgcctgttccagctcgtcatactcttcggtcagctttttcatatccaccttgccgtccgggaactccccggtcagcttgcgtctggcggcgtagaacattttcagttcgtcggcgtgttcagccttgtacttggctctgggcttctcaaacttgattttctgcaagccgtcatagacagacttcaagctctggaaagcagcggagctgtcatagagctgcttaattgctttcattcgagcggtctgttcgtccagcgttttcttcaagctctctgtggcagcactgtgttcgctgacacggctttccaaatcttcaagggagtaaatgccgtttgcccggagataattgaaagtctcgttcatctcttttaggttgctgaccttgcctttctgcgaatatgccccggctctgcgctgggtgtaataggcgttcagcagagaaacaaggtcgggtgcctgtggcttggcaagctccgcttttgcttcggcaatccaatcaaacaggagagcgattttcttcttaatgtcccgaataacggcattggtcgctctgatccagcggttgaactcgcctttctcggtgcgtatgcctttcttctccattgcccggacggttgcgccctcatggacgctgggaagaagctccacgccctgacgctcatagcttcggtggtcgatacgaacgtcaagccctttttccgcaaacttgccattgcatagctccgcccatgtctgccgccagtattccagcgtttcgggactgccccagtcggtagtgggaacggcgttgaaaacatactcgccgttctggtctcggatacggttgccgtcctcgtccagctcatacacccggcgttgctttagcccccacttgccgttctgctcaatgggacggatggggcaaagcacatggaaatgcgggtttgatatgccgccgtcctccttgtccggctggtgtacggcgaagtcaaccaccatgccccggctcacaaagttctccaacaaaaattgccttgcaagagcgatgttttcctcaagggaaaattcattctgcaaggcaatgtcaaagctgtatgcaagctgggcgttcttcccacgctcggctttttccacggcgttccatagcgtctggcggtctgcgtattcgggcggtgcatgggacggcaggagaatgtcggagcagatcacgccgcccttgcgggtgtagtcgctgtactcgccgtaatactcgctatacaatcgctccccggcacggtaggcggcagaagcaatagcggactgtcctgcgcttcgcttagtctgcgtgacgctcaggtgaaatagtgccatcggctttcaactccctttctctgtttgcttggctgatgtgggtaatcgccatgtgacggacagctcgctggacttcggacagggaaaagatgtgttccatcagctctgtcatttcggtgcgtgtgaaatctttgatctccggggcaaggctctcaaccgtgccgcccagattgcaaaggcggtgggtgcgcttggtgcgttcgcctttctcatagtgtttcttcctctgttccagcctttggagcttgtgctgttcctgaagaagctgagcttcagcttgttctttttcggctctaagctggtcgagggttttcgtttttgccatgtttcatgacctccttttttgaaaatgggtataaaaaaagaccgctgattttttcacacggtcatgtgtatcaacggtctgttttttagtattcagttgcaatgattatctcactttagtttacgataccagctatataatcataatcaattttttctgaaaccaccttgtaaaagaaagggtctttccgaatagtatcatcggaattgatgataaagttattccaatcatcggcttcattaccatcggataaataaatggtcatcttaaagctatatccagaataaccaacagacggcttcgacctttttaacttgatttcatttagattttcaataatatgttcgatttgtgtctcatctgtgatgtgagttgcatttccagtatttccattgaatacgacaatttctataacttcatcatgttccaaatccatcaagttaataggaacattgtaccagataccaatccctactgcgagaaccgctacaatagttagtaacattaccaatttccgtttcataattatgcttctccttttagttggattttcaaaatcaaacttgctggcggcgaacagcatttcatgctgtttgcggacggcaagtccacaggggatagccgcataagcggcgcaagggggtgtagccaccttgtcgaaacgaagtgacggaaacattcgaggtcaggcagttttcttctgctgacagagaatgaagctccgcaggacgcactactctcgacagagagtatagaagtgcgcccttagagttctaagggtatttttagataattgggaatgtttctttgtcaaactgcgtaacattgaacacgatacgccactcgacatcatcaccaaccggttcaaagtgcagagcagaacaagcagcatgaagtttttcttgtgaatttgttccatatataactgctgtcggaccatctgcaccaccaataacaccaacaacaaaacaggaactactgccaactggacggaacgaatgatcgtctggtgtaacttctatcggtctatcgccttcatcacagtcaaaaaccgaaatgttctccatcggttcaggggtaagtgtataactcatggcaatataatgtgtcggataaatccagcgatcagaaccaaaactattttgaggaactgtctgctgttctatttcctgcacggtcagtgtatgggttattccgctaacaggatgggaaaacataaatgaatctccgggtgcgtgaactttgaaatgtgagcctggaacttgtcctggttgctgctccattgtaagaaaaagtttattgatttcagggtgatgcttggttccccaaggaaatacgtctctgcatatgacccagccataagtactatccagcccataatggtcgattgcccattttgcttccaactcattgataacgccatctggcagacaaggattaaagctcacagcgcagccatgggttgtctgtaatattttctcgtttaacttcaagcaaggtttgaagttaaaacaaagtgggttttcccattccatctgcatctgttgctcacgggtaaaattttcacatgagtcattttcccagtccagattccattttttcatgaagtcacggatgctttctgaatcaactcgcatacaaaaatcaacgacaagtcctttgctacatgaataagctgccggaattacccaatgatatccagcccaatcgaattgtttatccagcttgatctcttttccggcacagtctttacctcgatgtccccagaaatctccatcaaagtagaccttccattcaggggcaaccaattctgcctctgaagtcatatcattatcgtaataatcttctgtgtatttaatctgactgtaatcaaaggaagattgcaggtttttgatatatgtccacggttgttccataggcaacaaattcatcttctctgaaatttccgataaagtttgctgttgttcctgggttgtagggttttcattgagaaaggcttcaaactgtgcttcgttccacatccacgcttgttccactgccgccacatcaccacaagccagtataagccgcagaaagtcggtaaaattttcagctactggatgaacataatcaggagaagtattcatggggctgacagagaaaaccatctctccaaatccacgaatgaaacagaagtggataccatctatccctgcccatccaaaaaccgatgccccttttggggtacaaaaataatttgtattatcctcacggagttcaactcccacaggacttaaatcgacaccccgctgtaaaaattttttcaaaattctattcattaagcatccccccataaaattagtgctatcacgctctttattgtagtaaattttatcacgagagtgtgaataaatctactggcgaatgctgaaaccgcccgaacagtttctttctgctcaggcggctttcttcatctatttttctttcttctgctgcacttgttcatgggcttcctgctgaacatcagcccagcggaaaagccatacttgaagtgactttcactttcttcacattgggcgattgctgtctgcgcccggagttcctgcaccagctcatagtcctctttgctgagccgctgggacaactgctccatgagcttttcacaggctatgactgcctttcggtattccggtgatgtaggtacaactgtctcgcagggataaaactccccattatacatggcttccaaaatcatagctttacctctctcaacagtagattagttccgtcttgatgatttcctctgcccggcagcggatggagttcattgactgcacccataacatctgattttccgctttcatggcttcggtcacgccctcggctttcatcatctgccggataatcaagtccagcctgtctgccgcctgctcgttcagatcggcaacgacggtgtggagcctgccggacaaaattagctcgttgtaaagcatgggacggtgcaatttcagataggactggtgcaagcgtccccaatgcccaataggtcggcgttcctccggcagcttcaagtccggcacatagtagtcgcccaccaacacatagtccataccgttctcatggattctcggtttcaactctttcataaaatcacgctccctttctcggtcccagctgcggcaaactgctcaccgggataaatacccctctggcaatatcctcggtgcggattgcctgttttctggcttcaatctccgcttttttcttggctttcgtgcgctcctcatactctttctgtttaccattggctttccgcttcaagtagttctggtggagcctgtccttgcgttcctcacgcttgcggatttcctctaattcctccggggtaagctccacttcgccaaacgcagggggaacgaaacgacccacgaaattgaagtaaatctcgacctcctgtgtggtctgaatactgcccttgcggtcacgctcatgcacaaggattttctcaataaactcattgagcatggcaatcgtcagtttgtcgaagttctcatacttgtcaatcagagcgataaaacggtcagcgtccttttcgtgcttctcgtagctcttgatagccttttccagatcggagatttcaacggtaagctcggactgttccttttcgtattgagcgtccagagtggcgtatctgctgtcggacagctttcctaaaatgttgtcctcatagattttgcagagcaggacttccagctcggaaactctctgctttgcggtggcaaggcgtgtccgctgtttcttgacctctgccgtctgctggctggactgcgcttcctgcaccacacggacaaactcggctcggtcatgcttcgcatactcggcaatagctttgagcatttcggaaacaagggacagtaccacatcttcattgatacggtgctgtgtcgtgcagagctttccaactgggactttgctgtattgggaacaggtatattgagaaatacgcttgccgttgttggtacggtggacatacatcttgccgccgcaatcggcacaataaagcaagcctgtgaggggagctgcttcgccccagccgtccgggtagcgtctgacattcccacggattttctgcacaaggtcaaaggtctgctggtcaatgatagcttcatgggtattctcgaaaattgtccattcgtcctccgggacataatggcttttcttgtccttgaagtgctttcgggtcttgaagttgatggtgtgtcccagatattcacgcttttcaagaatgttgcagatggtggaagaaccccagccgtacacatctttgaaggtcttatttttgttcacgccctcgccgtgccgggcaaggtaagcggacggaatgaggactttttcttctttcagcttgctggcgatctgatacggaccgtagccgtcaatcgtcatggcaaagatgcgcttgaccacctcggcggcttcggggtcaaccaaccattggtctctggcttcgttccaaagatagccgtaaatgaccgtgcctgtgaggtgcttgccggacttgcctttggactggaaagtggaacggattttacggctggtgtctctggcgtagtattcgttcataatgttgcggaaaggggtaaaatcatcgtcccctctggcactgtccacgccgtcattgatggcgataaggcgaacgccacgctgacgcaggatttccataatctgaccgactttcagatagtcacgacccatgcggctcatgtccttgatgcacaaatactccacattcccggcttccacttctttcatcattgctaaaaatccgggacggtcaaagcaagtaccactaatgccatcgtccgtgaaatggacaatgtttgtaaagccctgccgtgcggcgaactcctccaacattgccttttgattggatatggaattgctctcacgctgttggtcatcatctttgccaaagtcatcacggctcagtcgttcgtacagagctgtgattttctcattttttctcataacttgcgctcctttcttcggttttaggttgtgtgttctaagagacttcccaaccgcttgattaagaagtcttttagagcatacaacacctgccgccagcttatacttcttatactggcgaactgcaaaatgttccggcttcttctgttccagttcctcaaaaagctcatctacggcatttttgaaggtttcatcatcctcgcgggcttcgctggcattgataaactccaacagcgtggagaagttctgctcctcttccggggcttcataccaaatgtagccgatcaatgcacagtaaagcagccgttccgctttgatccagaaatcctcgccagacttctcgccatcaccctttgtgttggcgatgatggtattgaccagtttcagaatatctttctcactgcggatgtaatggaacggattgtaccgcatggattttttgaagttgatggtgttcaggactttgatcttatacccggcatccgagagcatctttccacactcgacaataattgtgcctttgggatcggtcaggacatagctgaccttttgtggcatctgcatcaagttgggcttgacgtaaaatcgggtcttaccgctgccgctgccgccgatcacgatgacgtttttattgcgggcgtacttcggatgctttggtctaccactcatcatcagccgttcggtctgtgtgaggatgacgttgttctcgaataccgggtcaataaaaggttcgatgtccttctggttgccccaccgggcagagccgtactcctcgccttgccgatacttcttcgcgttcttccccttgaagtagatcactgctttcagcgcagctgcgccgaccagccccaccatcaggtcgaatgggtgaaaactgggcaagacacttttgtaggccagaccaaagttcataaaaagaaccatcagcctgtccaccacagaatcgccattgcaatgacggtatagccatgcggctttctccaccatataaaaggcgatgatgtacggaaaattcagcaggatcagctttttcatatccgctgactgcatcatcccgctaaactctgcagccagctttttgccccatgccgtgccgcccgtctggttggacggtgctttgcgcggacgctgggcaggtgttttcaactttttcatcgtatcggttcctgctccctcttcttttctttcttgagctgacggtgattggaaagttcctctttcaccttttccagcttctgacgtaccgattcacgtttctgctttttcatcgtttcgctggtatactccttaaaggcagcggtcataacatccacgtccctggccttgaaaaagacaaggtattctgtttttccctcctgctccacctttttcagactgtaatcaatgccatacttccgggctacccggtcgaaagacttgatattattgtccgtaacaacgatgttcgtgatctgcgcgccgctcttttgcaggctcttgatgctctgccgacctgttttcttacattggcttttttctcctttccccctctgctttttcttgtccatttctgtcagcagctttatcagggctgctttcaaaatctgtgcggtgatttttcctcctttgatgcacagcgaaatggttttctcgttgacttcttcctgcacggatgctcacctccaatctatcgccgctgcatcaggggcggactgccccggccgcaggcggcgcggtatcgcccagcaccgaacggaacttcttgcggcactggtgcagcagataaccacactcccatttgtgccggcagtgcttgcagggatggccgctgtccgttcccggacgctggcgcatcatgcgttcaaacggattgtcggtaaaattcataggcttcaacctccctgttcagccagcggcagcacaccgcgccgcttcaaagtgtggtaaaggaacttccggcctttctgcgtccatgctgtatgcagcttttccacctcggaaccatcgctgcgctggagccggaatgtcaggctggacgtatagcccttaccgtggtgttccgagtacagcacccactgaccgttggcacggtactggataccgtgcagatgcagcagccgattgaacaccttggctccacagccgtactctttggcgatctgcgtggtcgtaaccagcgaatcggaatcgctcaactgcgcttcgtagctgctccggcgcggggccttcttatgcagcaggccgagcaacgcatcccagtcaaacggttgcggatggtacgccgcactgactgccgtgtggtgcagtttgcagagcttctttgccatgtcctgcgtgatgcggtagtctttcacataccgctggaccgtgcgcccgccctcatcctgcagccggacacggggcatatactcgtagtcgcggccctcgatgaaaccatactggcacatacgcgggaaccacttgcgaaaatcactgcgaatgtgcatctggtcatacagatcacgcgcccacagcgtagagggcagcgtgtccatactcatgaatacgatgtccatggggttgtcctcctagttcttatctactctgctgccccactcaaattcatgccgaacctgtgcggaataatagctatccacggtcacaggtgcgttatagagtgttgccagcaggtattgcttgatgttccgaatctgagtgctgttttctttcaagcactccaatatgtactggatatgcgaggaatccagcttcatcaggcggcttttcaccacctctttcggcttttcctcgccacagatgcgcaggaacttctttctgctggtgacggtttccaccagcagttccagaatctcatacagaaccattttatctgccggatagccctgttccagaatttccagttccaaagcctccttgaaatagcggcggtactgttcttcttcctgcagttcagccggatagataagatcagtttcactattatctgtcttatttatcttctcagtattacttccgtttgattttagaactcccggaagttcgtttttcaaactgccggaagtatgattttcatacttccagtagttcgattgcgaaagccccgcataaaggtctttcacatacagcagattgggtttgccaagtccctgtctgtgccgctcgatgagccgaaactcctgttccagttcatccagcagtttgactgccttttgtctggcacaatgaatagagtccatgacttcctctatcgtgcagataatgtaggcgttgccatgcttgtcctgccagccattcttaatggaaaggctcatacggtcaagcagcacagcatacagcagtttggcatccccggacatcctctggaacagatctgccttgaccagtgctttcggcacacggtaaaagctgtatcggtctgcttccagacctttgaaatacgggtactccatgtaaattcatcacccccctattcggattagatttgcactattggaaataacagtacattcctacggtggaacacgtttccatgctccaccgcagtgtatctgctgttatttgagctttgccattctgccccagcccgttcctgccccatatttcagcggcgttttctctggtaagacgcgcaggatgcacattcagtgccagaagtatctctctgggatggcttattcagttttcaaagaacttttgtgagggcttgttgtataacccttacacctatagcattctgaaaggggtgtttggcaaccactttttcaaattttctcaaaaaaaaatttgccgcagggatttttaagtccccacggcagtttttctatattatgtataagtgcaacggatgcggtgaagcccctttttgattccctttgtcacatactgatgtgatactcccatctcagcagcaatttcccggtgcgtcattccctcaatatagtggcgacaaatcatttcccactggtgctttttcagcagttcgcttgcctttctcaaaaattctttattcaacacaaaatccataacatttatacgcggatcttccatttcattgttatactccggattcacatccgccgcatacgaaaaagtttcactttcccgtgcttcaagattacgcacaagtcgatcctctccctccagcacaagacgaatatgccattccatatcctcaaaatggttatgtggaattgtctgatgctcatttccctgcgattcatagtagtagtgtgtacagttatgaagtgcaaacaccgtatatctttcgtgtgcatggtaggaaacatatccatttttatagacgactacttccgcatggttctccatctgttttcggagaatcacttctataccatcttccaatatcttcttcaaacccggcactcgcttaaattcacttgcaacaggaaccatcttcttcagttctttcaaagtaataaaattcattttaaccaccttcctgcctttcggcaacaggtgagtcttctatgaaagaacagcagaaatgacctcagacccacccgtttttttttgaacggggagcctaagctccattcgattaaaattatgcctatacctatagcattctaaataagggttttggcaaccacttttttcaaaaaaatttcaaataaaaaagccgaaacaggatgaactacttgcaggcgcactactgcactgcattcgctcattctgttccggcctatatcacatattgctacggtatcgctctaacaaacagatattatattgtagacccaaaagaacgtctgatggagctggtcggctaaccaggtgccgcctaagattccacctctgcgctttcagtgtcgatgaagcactctgcttcaggcttctttccgttggttctctgctgtgaaaaattcgatactcttcacgggaaggccgtgaatgctctccaccagagattcagcagaaatataatcttcacagccaccacgcttgatctggagcatattctttccatcaacgacactacgattcccaatccgcagcccctttggggtgcggatttcatgttctccgttgctcatcttctcacggcctcctttgtgttggtttaggtttcttttttcttctattcaatttcaccttttgaacttccgctcttttttcacctttttcggcttgcatatttacgatttttacggtataataatccaaaagatgatagaatatagcatatattataagcaagtcatgccgccgtgtcaagaggaaaatgtgaaaattcgttgcatctttcagattgaatatttacaaattcctttgtacattgttacagcacgataactacgccatagaaaggttgcaaacatgaaatttggagagaaagttcgcgatctacgaaagaagcattctttaacacaggacgaattggcacaatgtctgggtatcaacaaaagaacgatcatcggatgggagcgtgatggccgctaccctcgcagtattgaaatgcttgaaaagatggccgatatattccatgtacctctgacctatttacagccggatcagtctttatttatcgaacgtgccgccgaagcctacggaaaaaagggcaaaatagaagcccagcatctcgcatttgagcttactgagctatttgccagcggagagttgaccccgcaggatatggacggcatcatgtatgaaatgcacaaagcctattttaaataccgagaacaaaagcgagaaaaggaacgaatcatgaacctgtaaaccactgttccattcactatgccatccccggaaggagataacattatggattctgcatttatttaccaagctgccaacgaacttgtcaaaaatgccggaactcgcaacatcaaacagatcgcgcgcagttgcagtctggacatcagtgaaacatctcgcattaaagatatgttgggtttgctttcactctattttgataagccactgatccttatcaatcgccagctggacaaacagacaaagcagatggtgtgcggttatgcgctcggacattatctggagcatcagctgcttatggacttgcataccctgaacaagtttctgaccattaaagataagcacatccttctttacgagcataatgctttcacatcccacctgatgctggacagtgatgaagtctatcaaatgacaaagcgcgggttggacgcggcgcagatttctgcggccaagcggattcacctcaatctggtgctggtaaaacttcttgagctgcatcatctgggatacgatctacggcactatcacgcccagcaccatgcgtttatcaaacagttcaaccttccggcactttttcagtttgatgtggccgccggatgaacttatgttcttataaccctaaaacccgtaatgaacgttgcgttatgcctgtccatcacgggtttttcgtgttatttcagttttgcgaggatttcatcggcactcatgccttcggcaagcagctttttcagaacggactctgcttctgtctttttcgcttcttctgcagctttggcatctgccttcgctttttttgcttccagagttgccacttctttttgggtcttcttcagagcagtcttcttctctttcaagtcagcctttaaagtgtcaatgttggcggtgatggatgcgatttccgctgtgagtgcttccttcgcggactgcttttccgcaatctgcgttgcaaaatcagcagtcacaattttgggcttgttcttgctaccttttgttctgggcataataaataacctccagaaaattatagtaattttagtatagcactctgataaggctgtttcaatattacgcttaataaatgcttattttctggtaggctattttcaatttacagactatatcctctatcacgaatcacatcgacaacttcggaaacatatttctgacaagtatcatgatcagaggcttccaccatcacacgcaccacaggctccgtgccggattcacgaaccagaatacggccagtatcccccagtgcttcagccacattctttaccgctgtctgcacagcctcgtcgttctgtgctgccttcttatccgttacacgaacattctccagcacctgcggataaattttcagcggtgctgccaattcgctcatgggcttctttttagccagcataacttccatcattttcaaactcgtcaggataccatcacctgtgctggcatacttggagaagatgatatgtccgctctgctcaccgccgatacgacagctgttctttgccatatactcatagacgtacttgtcgcccacagcggtcttagcgtaaccaatgcccttttcgtcaaaggccttatacagaccaaagttggacataactgtggtgacaacagtattatttaacagcttaccacgttccttcatgtagcaaccgtaaatgtaaaggatatggtcgccagtgataacattgcccttttcgtccacgcacaggcagcggtcggcatccccatcgtaagcaaaaccaacatccaagcccttctccacaacaaacttctgaaggccctcgatatgggttgaacctgcattgttattgatgttcaggccattcggattattattgatgacataggtatctgcgccaagcgcatcgaacacggactttgcgatattccaggagctaccattggcgcaatccaaaccgaccttgacacccttaaaggagtagatgcccagcgagatcaggtagcccatgtagcggttgcgacctgccacatagtccacagtgcagccgatgtgctcacgatgagcaaagggcaactctggccagtccttatcaaagacatggagtttgccatcaatgtagtcctccaccagcagcagagtttcctcaggcattttctctccgtagcagtcgattagcttgatgccattgtcgtagtacggattgtgactggcggagatcataatgccgcaatcaaagtcatccacgcgagcgatgtacgccacagatggagtagtggtaacatggagcaaataggcatctgcaccagaagcggtcagaccagccacaaggctgtactcgaacatgtacgagctgcggcgggtatccttaccaataacaatacgagcagggtcggtgtcaccgttgcgctcacggagaccattataataccagcctaagaagcgaccaaccttataggcgtgatccgctgttaatgtaattccggcttctccacggaagccgtcggttccaaagtattttgacattgttagttttcctttacttttttctttcccaccatccatggagcaagtcttacaacaacctcatatgccgtactgcatattgccatcgtaataactaccactaccatggccagtagaaaattttctctcactgcatctgtacccagattcaacagaattgatacaatttttaccacaattcgatacacagggccgtgaatacaaagaataattagagaaatccgaccaaagtattgcaggattctattctcgttgataagttgagaaatcagaattacagcagcaacaccaatcatggctgttacaaaccacatgattcccatagttaaatgatagcatgataaggaaaagctcaaagcaagcagaactatcgctactattcctgctttcacttttttctttaccgctttcacgcttttccccgctatgaacacacccacagcatagaatcctatgtacttgaatacacgatcaatgccccaaataagtccatgcattggaaccacaataaaagctaaactcattagagcagaaacaagataagccattctccttccgcctagattaaccagtatattaaaaaggattaccgttacaaagaaacatggtaagaaccacaaatggatgttgaactccaaattatcataacagccagagaataaaccgaacaaagaatccataaaactcatatctgaatcccggaatcttctctccatcaattgccagtagataagaaccagaaaaccgaatgagaaatacggaataacaatggtttggattcttcgctttatgtctgctaaaactgttttttctttatacacccatcctgctgccaagaaaaacagcggcatatggaaggaatacaaccaattaaagatggtttgattggaatagatatgccctataacaacaaggattatgcctatcccttttaacacgtcaagccatgataaacgctctgctctgctctgctctgctctgctctgctctgctctgctctgctctgctctgctctgctctgctctgctctgctctgctctgctctgctctcaagattgtgtcatctcccaactctttgtcaatatgaaagtttatcttctaattccaactttagacaaaataatcttgatctcatttttcaaatattctttcggtagtattttcttcatagcaaaatcaaaacccttttctaagttttcaaagaaaaacattcttgatgatggaattctcgatggatattccaattgatgatttaattggatcgctcttgtaatatccgcatcaaatagttccacatttgacttttttagtaattcttctccctttttcgtttgacagagaactaaagatattccctttttcttttcctcttcagacaattcacttccccatgaatcacctaatgaaatatctgaaacacgagattgtgacgcataacgacaggaataacaattctcagtataatcaatacttttcaggaaagcatatgtatacatatcaacaatccgcggaaaaccattacttttccctactgatcttaagccaaatgatgttttctcacggaaattcaacccttctaattcttcgatatccactgatttttcttttaaatacatcttcaacaattcaggtgaaggggacccgtggcatattaaatccactgtatacaaattatcttgattgcgtgagaaatttttcaatgccgcaacttgacatggcaatccaacaaaaaggacttttttcccttcttgtagtttcctttcaatatctatatatattgtttttggattacttttaacatatttagatcctacaaattgctcagccctttgggtcgaatttgtcaattcaaaaacaaattctcccttattaagcatacacgaagcaacatatccaccatttttaataaatgaatatataattgatgaagcaattcctcctgaagatgcattacttctgatttcaggattcaatgcccatccttctttccaaaagatagggttaacctgctccacgcattttacattaggacaaattttttcacacaacccacaattcacgcactttacttcatcaattacggcattatatgtcttgtaatcatctacaatagtaatagcactctttttgcacatatttatgcaagccatacaaccagcacacatatccttagcgcacacggttttcatgcaaaagcacctcccgtgataggcacaagaatatacgctgttttctctattataacattatttcttataccccccccagttttcgcagccttcttaaatactatagcttttctaatagccatgagccttggtgaaataaaatagcaacaccacataatttttttcttaatacttttttccatttttaatggcaaaaatatgtttttcctaaggttagaaacacactccttatacgtttcattatactctaaaatcatattagatcgaacaaggccatcaattatacttctattgaaacaatacctgtgatattcccatgctttctcaatatcaatattcttttttatccatgcttccttttgcaattccaaagatttgattccacacaagttactctttaaattgaattttctcatcgcactatcaggattaaaagtttgatggtaaactgcactttcaccaactgccacactgtttacatgttgtagaaactcaacattaaaaagcattccttcaccataccaaattttttcattaaattttatataattctcttcgagcacactccttcgatacatcttattccaaactgctacaaaaagatctcccaaataaatccactcaatagctttttccgcactaatcacagaaaaattattatttgatatatcattgcaacctgaataattattcttattcatcacaacatcgcagcttgatttctctagtaaatcaacaaaatatgtcacatagttagcatcaacccaatcatctccatcgacaaaggtgatatactcacctgaagcgacagccattcctgcatttctagcactagaaacgccatgattttcctgatgtattacaactattcgattgtcttcctctttcagtctatcaataatataaccacttttatcaggagaaccatcgtcaacaagaattacttctatatttccataatcttgttttaataatgatctaacacacttatcaatatacttttcaacattatatactggaacaataatgctaaccaacttctgcattagctcacccgcttcctttgaattttatttagaaaaaactgtaacatcggaatccaagttttggaaaacaccgtaaatccaatcaaaagaatcacaagttgaagaaggaatcctttcattccatctacaaacattaaaattgcagacacaagcattaataacgaacctaaaatgaattccttatacataatatcatacttaatatattttctagtgtggaacacacggaacataaaaacagcaatataacttatacatgttgctaatgcagcaccatagactcctatcactggaatcaagataaaattcaatagtatattaaacgctgcgccaaacgatccagaaaacaaatagccaaaactatccttatgtacagtataacttgttgccatgaaggtgcccaatgttaaataaacacatccaataatcaaaaacggagtatatttccaagcgtcataataactatcagccacataaactcccaagaatggttttgttaatagcaaaaggccaattcccatcataaacgcaattgcagaaagtgttttgaacattttattgttgtattcagtttcatcactcgtgccctcttcacgaatcgcagaataactccatgcttgattaaatattcctgtcagtgttgatacaagggtgggaagtttataagaaacagcatagattccgttagccgctgcaccaatcatgtaggtcaccataactctatctgaagaattcatgatccaccacataaatgtgttcgggataagaacaaccgaataccgaatcatctctttgagtttgcaacgatctatgttgtgaaaagagaacgctttatatccttttcctgcaataatggcataaatcgcaactataaagtttgcaatgatatatgccaataaatatccacctgtttccatcttaaagacaagtaaaaatgttatatttaaaatcgctatcatcaatgtctgaaggatatttccaagtgaatacttaagtaacaattcctttccgcgtaaatcgcatagaaacagctgactagcagataaagaaatgacataaaaataaacatacatcgcatagtcagatacttctgtgatgcatctgcatattggaattaaaaccagtccaattatcatcgcaataagtagaactatgcttccacactgtgtgtttttttccttatctgcatctttgtctaacccgaaccgcataaccgactcagcaatattcaatgtaagcattggccctgcaactgtactaatagtagttataagatccaccgtaccatactgactcgttgttaaaacattagtatacaatggaatcaagaaaaaagaaatcatcctagagccaatattgccaagtgtaaaaatcaatgtgttttttaataagtatctatttcttgactcactacccattttaaatattttcctttaaatacaacgttgtttttttacgctcttgttcaattatttgattagttttataaaaatcaacttcggtattatataatcgctcaatatcctctagtttttccacttttctatccaatttatcaagtttattaagtaatgcttctaatttattgcgatttgaatctcttaccagtgtacaaaattttgtattcattttaatagagaagactgtaccatgaaatgtatccgtaatgacataatctgcatttttgaaataggaaaatacatacaacggattgcaaattatatttttatccgcaatatttgaataatgtccaacacatataatcctcttattgtgcctttttgcaaatttttttatatagttttcttcttctctgcttaatctgcccgtgtatgcatataaaatgatataatctctttcataagtcgtatactctgcaatttcttgtgtaaaatcatacatcagaactggatccatatgaatttccggagagtaaccgagcaattgcctaacaatatgagcactattttcatcacgcacagaaatagctgcaaatcttgacagcattgttttaatttcgtgtgcaattcctgtatctaccaaatcttcataacgtgtgcttccaaaagaagccgcatatgaaacaatcttggagtgtgcatatccatctccaaataactgcttagaatatcctactggatatggttgaaggcaattaaatacttcatcacttccaatcactaacgtgtcaacctcacagtcataattcagtttatcaaccccaatattctttaaatccaggattaaatttctttctatttctttgaaaaagttcttttttttcagataattccatggggttctgtttttcagaatcttatccactatgctttcagctttagactgcggtttttttaatctatttgtaatatcaacaccaaatctgtaatctataaattcaacttctgattttgaaaccgactcaatcatttttttcaaaccatacgcttgcaaaaaagatccataattaataatcctttgcatagacataataccgatttttttatccatctactcgtttctcctctatctcataaatatatacggtactgtttgatgcgcaccaacaaatacaaaatagtaccaccaataaaacatataatatcctatgattaacggtcgaataattattccgctttttcttggttttaatgcactcattgcctgtgatatgacaagcacctcaaaaatcgcaaagtataaagcaattcttccaccatacccgctcacactggtaaactgtgaaaacaagactgcatatacctccataaccaagaaaaatgaaatgtcttctccatcttttctcaaatatctataactccagatgatcaatattatttgaggaatacggattaaaagctggtttggcataaaaaccaattttcctgtaacgtagctgacatattccccaaatccaacagccgacaaagcagacacaatcgcggacatcataatcatcgctacgaaaccaatccccatagatatcagcattctaggagtttcatttctcttactaacattgtttcctgttatgctcaaagttgttcctttgacaatataatcatacagaagataaatcagtaatatcagcaatgagcttgtgtggaataagaaagcaataatcacacagataaacgcatttttcttttctgcatttttccaatattcaaatcccaggactcctaaagacatagcgattgactgacgcatcatattcatcgagggattataaaatgccatgcaaaagacaaacatcgccatcccaaggcttgtgttcttatcttttctaacggcaacatatagtggcagaatcacacataattccagtatagtttgaacgcaatataatgaacctgtaatttttgttacaatcaaaactaataacggaaacaatggttccatatccttcacataatctgttgtccatgtgaaagcatggaaagatgagttcaaatactcaccaatgctatggcttcttttcgctgcctcataaacaggcattaaataaactcgtgtatctgttccaacacccaccgctctcattcctgctaacaaacacaatgccataactgatatgaatacaatcggtttcctttgtgtatatttcacccgatcagaaagcgcaaaaagacctatcgaaatcataaatacaacaatatatggtgtcatctctttttgcctcccctctttacaccttccacttcctgtttctcgcaacgacaaccttaagtgctattctatttccaaataatgatatcgcagcaaaagcccgtaatctctttggggcattaccatcttttagcacatttattcgatgtgctttcaagatgctctgaatacgcttattccggaattctaaaggctgtggatttcttgctgcaatatcatatatgacatttatatattgagtcgataatgcattatcaaactgcgtttttccttttaccgctccggcgatatcatcaacagcatctaaagcttctaaatgcttttccttataacctgagacaactatacttccttcatcccggtaatagtagaaatagccatcaaattctacataagttacgctcttactcttcaagattgttttatagattgtaaaaagatcttcagagaatttaccatatggaaattccacacccttaaataagtttctcttaaaaagtttaccacacgcagatgtgccaaatggtataccatatagcatactaatcaaagcatcttcggatttaaaattagacgttttccaagctgttgaagtgtttttctcatctcgcttactcgttctcttcatatttgcaatagctatgtcggatttattctctaacatagcttcaaagagaatttctataaagtcttttgaaatgtaatcatcactgtcaacaaaagtgattaaatcccctgtcgcaaccttcatacctgcatttctggcatcagacagaccaccatttttcttgtgaacaaccttaatcctcgtatccattttctcataatcatcacagattttcccgcatgaatccggagactcatcgtccactaaaattacctcgatattcttatatgtttgaaaaagaatcgaatcaacacattcattcagataagattcaacattatatattggtacaacaacactaaccagcgacgtcacatctttattcttcatattttctgtcattgcttaatacttcctgatatatgttcttcatggcggcaatagatttagatacatcaaattcttctgccttttttttgcaagcagctgccatctggttccttgcttccggagtcaggtttacgatattttcaatagcttctgcaaactgatgtgcatcgtacggatcacaaagatatcctgtttttcccggaattacatattctcttatcccctgcacatcagatcccacaacaggtacacctgatgcaagtgcctccactcccgtcattccaaatccttctcttacggatggaataacagcaacatccgcacatgcatttatctctggaatatcaagtctatgtcctgccaagaaaatcctgactcctaatctggaggctgtttctttgagttcttcctcgattgttgaattaacaactgctgttccgcagattacaaatatgtactgttcttttctatcaagcgttcctaaggcttctataataattttctggttttttctcgatgacaattcacccacagctaaaaccatatgatcttttgagtttacgccaaatgatgctctatactcatctctgttaattcttaaatttgcaaacctatgattatctaagccaacgctcggaataacataaaccttggggcaatgcattttttttgcattaccatagtcctcatgatttatcgtaataatagcatcacaaaatcttgacattagcttttcagctgtaaaataaacaatccaactcttttttgatgatttgtctgtgaatgcaaatccatgtgtggtatatataactgttgttccagcttttctatatttccttgcagccattctggttaaaatgccaacaataggtgtatgacaatgaattaaatcatacttattcgttttcaaaataagttttaattgtttataagcctgaatattttgagttgacaccgggctttttgtatcaaattctacctgataatgtgcaatccccatttcttccagtttaggaatttcaatcaggttagggcctgccgcagaattttcattcattgccactgacacttcatatcccatttcttgaagtgtcgcgatatcattccacagaaaatgtagaaaaccagcaagattcacaactatcaatgctttctttttcatccgttctccttatgctgtttcccatttattagttcttcgtaaattttgcagagtttctctatatagttttccgcatcgcatcgcttttttgcatacgctactatgcgcgcgctcatatttctatactcggtttctgtcaagtttaaagctttctgaatagctattgcaaagctatcaggatttcccggttctgccagatatccagtttcaccatcttgtacaatttcagaaagacctgcaatatcacttgcaacaacaatcttccctttagccaaggcctgtaatgcaacaaatgccccattttcataccattctgacggtacaagaacaactttggcgcgttcaattatacgatccatttcttcgccgaaaatcgcaccgtttacttgaacgcgaccctcaagattgtgttccttaacaaaattttttattctttcttcttccgatcccttaccaaccagaaccaatttttcatcacaatgcatcttggcatatgcctttaaaattgtcaaaacgcctttttctcttgcatatcttccaaaatacagaatataattgtcatgctcataataggctttgtactcctgatttatcggcaagaaattattcatcttgattattggtgaatgtgtaaaatgagctttttctactaaatttttataaaaattgcattccgcaatatataagtcaattttgtcataataatgtccatatctaagaaattgagcttctatatatgccaatacactctttgcaagagagcctttcatgcacttatttttcacacaattccaatatccttttgtcgcacaatcactgcatatagttccgtcttgtcgcagcatcgtataacaaggacacactgctgtcaattcatgcaagtgcatcacaaccggaatgttatatttcttcaaaacatcaactaccgaaaatgtaatttggcgatgcaacaatccaatatgggcaatgtctggcttttcatcccgaattagtttttcgatgttatgtttagattcaaaagaatatattaatttaattcccattttgattttcttaaatgtactcaaattgggatcattataatctacatttgaaacaaaatatttatcttgcgcacacggtatatttctttcatcatacattgaaaagaaaatgacttcatgccctgctgcagttaacgcctctgccaaattataatgaaatgtttctgttccacccaacatataatgaaacttatgtattaatagtattttcatgttgctattcctctctttggaccaatttttcttttaacagagaaaaagaatcataatgtaggtctttatctgcaataattggcatctcattttcttttataggccaatttatcttcagctctggatcattccacggtattccaatctcatcattcggatgccaatagtcagaaaccttaaaacacacctctgcaatatcagaaatcacataaaatccatgtgcaaaaccttctggtatataaaattgttttttattatctgctgagagttcaacaccataccaatctccgtaggttgaagaagtagtccttgtgtctacagcgacatcgtatatttttcctcttacaactctcaccaatttcccttgcgggaagttcttttgaacatgtaatcctcgcagaacgcccttaacactcatcgactggttttcctgaacaaaagtcatatttaagctatttttaagtagttcttgactgttatatgtttccacaattaaatcttcatcacttttatatgacgctggatttacaacgtacagcccttgtattcctgttttttcaatcgacaaatgttgatccatattctcaattctcaccttaattcatctaatttgtttattgcttttctataaattgttaatcccattaccaataacatcaccaacagtaaataagttgtcatatatctgataactggactttcaattctctccataatacctattttctctacaattctaaagacaaccatgtgagataaatacatctccatgcttaaattgctaatataatttgtaaatttattattcatcaacctattgtcatatcccaaagctaaacccagccatccagtataaagtatcaaggttttaataaccactatattgatagaatttattacgtcaggggtaatgtaatagcctaccgtcaaagctaacacaacacaaagactaattactttaaattgatttacaaaacgttcaatttcatctttatacaaatatacaatcccacctatgagaaaatatggcaagcaatacaaaaatgaatgacgcatcacaaaattttccgtaacaaatctttctgtcataaaatagcactggcacatatatgtaattaccaaggatatcacaaaggacactattcccctttttggactatagagaaggaaaacaataaacggaaatataatgtaaaatgcaaatatagcaccaagtgtccatgcaactccgattgtacttaacgtattgtttggcaaaaaaccaaacagcattgttatctccattaagccttcgcatactgtctttggagtgaattcgataacacaatttaaaagtatcagcagtgcaaaaaagggaactgttctcttgtacctttttgaataaaacgcgtctatactataagttcctgtttttaacttttgataatatccgttgcacatcccaaaaccgctgattatcatgaatagataaactagatagtcaaaggatggtataaccttgtctagtaccccccccccgtactaaatccggtatttgctttaacatgccaagctataattgccagacatccaaatgttctaagagcatcaatgtttctatattttcttgtatcacccattgtttattttccccacaaatacattttcatactgtccgcagatcttatcccatgtgtactcttctgccacacgcttcttagctctccggcccatctctgcaatttcatctgcactcattcggtctgccttatcaatcaactttgcaaggctacccggcttgcggctccaataaagagcacaatcctctgcgacttctttattaaagccaacatcaactagcaggtttaaatccgtactgccgagagcttcaatcagagacgggttcgtaccaccaaccgtatgaccgtggaaataagcataggcattctcacgaatcttcttcagcagttcctgatcgtaaacagtgccgacaaatttgattctcttatcactcttgaaatgaagtttttcctcaagctcatttaagaacttttcattcacattcgtaataatcgcaaagttctttttgctcttgcttttcatgaattcccgaatcataacttcaaaagagttctccggtacaaaacgaccgacgacaaggtagtagtcctttttcgtcagtcctttttctctataccagttcatcagcttctcatcgtcatcagccaacttactaagcgtcagatctgcaccgtacgcaatgaaggttgttttcggactacttccttggatgcccttaccgtcatagcattcatggatatacttttcgatattcacagagtcacagatagcaaggtcgcaatatttgaccatcatctgctcagaaatcttccaatacttccgaattggtgccgaccattttgccctcatccactcatgtccatccgggttcagatacacagttccacccagtttatggatttctctgtaaaaatgactagcaaaaggcccaatgcggcaagccatgatgtaaacaatcggatgcgggatatggtttttcttgatatgttcgcaacaagcctttagtgcagcaacatcataataaattgcctgcgcaggcccaatctgaggaacatcaattttgaagcagtgggcattgtggaattcaaattcgtggtcgttgatttttgtcacgccatcaaatttgctctcatccatgcagccatcgccattggctttgcaggcaacatgatatttgatgttttctttattctggtgatactctgtgagcttgtagacaaaggtctcataacctccgtaagcccccaatgacttcgcgccgacaaggtatacgtgctgcacttctttttttgaattcattcctctattccatcctcacattttatcgctaatgttgcatctattcccttatggataaaaacaaacctacggcgggtcgcacaaaggcaatccaccgtaggcttgaactctccttcaatctttatttgctgctcctttttgtgggtcaaaacagagcttccaaaagcctcctacatataaccccggattttccgcatcttgcagtttttcaacaaataaaacatttgaaggacaactcaagcagtcaaaaccctttagttatcgtaggttttcttggttgaccctattatatctctagccccggtacctgcaacagcaatcttataatttttcataataaactgctcctccaattctcattgcgcatatcttctaaatttagtttgtgtctatgtagtcatcccgaaagacagcatcgcgagcttttattctccacgccccaacaggcacaccttaaaggtcttaaaaataatcttccaatccacccagaagctgcgctccttgacatacttcacatccagatccatccactcttcaaaagaaaggtcgttgcggtgcggggcaatctgccaatagcagctcaaaccgggagttacatacagacgctgcttttcgtattcgccgtactgctcgacctcgcggggaagtgccgggcgggggccaacgatgctcatatcgcccttcaggatgttccacaactggggcagctcatcgaggctggtcttgcggataaacttgcccacacgggtaatgcgggggtcgtccttgatcttgaacacgggaccatccatctcgttctgatccagcagatcgtccagctttgcctctgcgttggggcacatagagcggaacttatagaacttgaagggcttgccgttgcggccaatgcgctcctgactgaaaacaggacccgcagacggatcatcgactacaattgcgatggcagtaaccagcatgacaggcgacagtaccaccaatgccaaagatgacaggattacgtcctgcgtccgacgcccgatccagtacaggcgatggtcgcgcagattttccttgcggttaacttcaacttccttatcgattccgacagtattcgtagccattttttctcctcacataaatttgcgtttgtttataagtttcttgttttaacccgcttttgccgtaacggtttcgacttgtgccgcctgctcagatgggcgttcgggattgtttttctcccaccgcatcccgatggcatccaaccttgcaatacgctcctctgtcagaacagcgcagcttttttcaggattatgacgggtataccgctgccgtttgacccatttcccgagggcgtatccacccggcgaaacataatcgacaggtactttcaggtcgccgtgggcttcaaaatagcgctttgcttcctgatatccttcgttccactggcggtcattgcggttgccccaatacatcccgatcctttccagccgcatgatctggtcatccgaaagcttttccttttggtacgcccactgctgatttgccacccagcagcccagcttctcccctgtggctgttacataggaacgtgagatattcaggttgccgttttcctcatagtaggcggcagccagcgcataagctttttcccacttggcatcaaaaacactccacaccataccgatctcatcaagctgcgcaatgcgttcttccttcaagcggccattcagcttttgctgtcgggtcttaagaatccattgccccaacgggtagccttccgggtcggtgtatttgccgggcaccatcaggcttccgtgggctttatagtacttttgggcggattccagccctcgctgccatgcaatttcgttccggttgccccagaccataccgatatcgtccaaccgttggatctgctgctgggtcagttgaccgggtatctgtccctcgcgcacccgacgctgcgtgatcagccatgttcccagactcagtcccgccggggtcgtgtagcgtttggggatattcaggtctccgtgctccgcgtaatagatgcttgcttcggagaaatagtgctcccagctggaggaaagactggcctgcagctgttcaaacagtacccggcaatcgtgcacctgctcgatgacctcgaaccgctcggtcacgatcttatcgccctcgccgttggcatacagacgatggactgcttcctgcatctcgctttgcagaccggaaatgctggtcaagccctcaaagttgttgaccacatccaagatcatgggtgcctctgtgttccctgccgtcagagcacgaccaatctgctgcttgtagatgatgggcgaaatcgtaggtcggaacaagatcacacccgaaataccttccacatggacgccctcgttaagcatatcaatgcagaacagcagcttgagcctgtcactgatgtccgtcttgaagtctgcaaacgccttgtcggtattcgggtcatccgagtaggcctcatacaccacaacgtccgggttgacccctgcgaaccactccggcacgtgggataccatctcgtccatgtgctctttgttggcgcagaacacgatgtattttccagatttgtttgtaatatgatgggcaaagaccctgtccaagccgtctgcctgctccagtgcgcggcgcaacgcgtccagatatttctgattcacatcctgaatgcccggtgtccgcaggttgtccacccgtgcctgatacttcgcaagcgttttctggtactgatagaccgtggtcacatatttcggggcaggcaaaatacccctgacaactgcttcgccaagggtcatttcacttgcaatatgtccatcaaacaattcttcggccatatcgcggttgttgtccaaatatcggatatttgtcgctgtcagcccaagtaatttcgcattcgggcacaactttaataacgccaccgcactctcgccccagcattcagcaccggcacggtggaattcatcgagtataatataggcaggcttctgcgctgctatttcgtccagctgcgcctgcgtgcagcacaccagtttggcgtaggtgtaaaagtgaacgtttgccaacggaaaatccgggtcgttctttttcaggctctccagctgggtcttgaagatatattcactgggagaaagccaggtcatgaccttctccgggttgtcctcgatcagcttgaacgcaatgtagctctttccggtgccggtgggatgaacaatggcagctttgccatactggtccatcatccggactgccgcatgatatgccttctcgttgtgttcaaacagacataatgccaccttgttcaccccttcccgcataaaggggtatcctccacatggaaaatggaggaacatggtcagaaatcagcgttactccatcagatttagcgctctcctacccctcatagacacctgatgtgaaaatatccggttcatctcccggcgctttcgggtcaaatcagagtgcacatagcgctgcaaagtgatgttggcgttagcgtgtcctaacaattcgctgagggtctttacgtcgcaccccgcctgcaagcaagtcgttgcaaaggtgtggcgtagcgcgtgcggacgcacttgacggacgaccgcctgcttcagatacaccttgatgctcttccggtagcagcggggttctgtgggtttcgattcattaccagataggaaccatgtagaattactggcgtttccgtgcaactttttcagcatcagcaataaatatttcgggattggaatttcccggcgggaggtgcgggttttgggcgtttggatgaccacctttgtgtgaccgtttccgcaggaaattcggcagactgtccggttgattttcagcgtgccaagtttcaggtcaaaatcaccccattgcagaccgcagatctcaccaatacgcagacctaattcaagccccaataacagtcctatctttcgtgtcgttggattctcctgcacatactgataaagccgttgctgttccgccggggagagaggtacgggtgctttgtcaacagcttttggcagcgctacttccagctccatcggacggatcaggcgtaaatgcgcggcatatttgcagatacggcgcagcatcgagaggcattcccgggcagaggaatttcccagcggcttgtgcgtggcatctgtgggcgcgatgatctgttgcatggcctgttccagaaagctttcctcaaaggatgcaaccggcactttactcaaaatgggaagaagatacttgtgcagcgtgtacgaataatgtgcataggtggattcttttacgctgttctgcagggagtgcagccacatctcggctagtgcttcaaaggttaggtcggttcttttcaggttgtagaaacccgcttccgcctttttctggatcagtactcgcttgacctcggcatagaccgttccgtagacgtagccccactgaatttttccttccgatgtacgcgctttgatgtagcggccttcccaccgaccatctttgcgtttgtgtatattttctccccgtcgtgccatttctgtttcctcctgcgtcttggacacccatctgaccacttattctgtccatcttcattttaagctgcgtttttcatgcagaactgggcaaagtgcaaaaaactttcggcttctgcgagtttttttctaaggtcaggtgggatgcatttgtatggttttctattgattcccagatataaccatgataaaataacaggagaattcaaacaatgatgtcgaaagattggtatcctccattttccatgtggaggatacttttttgttttttaggtgtcattttcttgacgcaaaaaggcccctgccgatcacatttctgtgaaaggcagaggccttctgctgttagatttcaatcaggtctggggagatgaaacaactgtcttattctaccgggtcagtgtccctttccggatttttaactacccccggggtcaggtgttcgcccatgtctgcctgaatcaaggcgttgatataggcgttcaggctcatccccttctctttagcatactcctgaatctgctccttctgacctttacggacaacaaggtttatccggtcgtaggcttttgcattgtatttgttgtggcttgccgcactggttcttccacccattgtattctctccactcttatatgtattgtttattatgcatgattgctcaattatgcaaagtgcataaaatcatcgttttttctttgtgcaacattccatcttgcataattgcgcaatcatgtgtatactcatgccatcgggaacaccggttctcacatccgaccattcacccaacgatttgaagagaggtacgcacatgagtatcaacgttttactgacccttgtcgagcagtacaaggaagccgcccaactgatcgaggccgcgcaggctgagcaggaacagctgaagatccagatccgcgaggcactagctgagcgctccaccaactatctggaagtaggctgccacaaagtccgcctgtctgatttctccagcacccgactcgacagcaaagccatcaaggccgtagcgcccgacctgtacgaccagtacagcaaaacggtcactggcacccgcctaagcatcacctgacatcacccgaaaaaagccccatacagcgctccctgaccaaagtttgcgttgtatagagcccactacacccgccggggcgggctacaccaatattatacctgtcccggccttttttatcaagagaaaggttcgaaaaatcatgaaacagactgtcaaaacctcccgcgctgctggtcagctggaaaagatgttccgcgagctcaacaagcactactttgcaggcaagctgcccgagcccattatcagcctgaaaaagaccccgtccgcctatggtcatatcacctgttccaaggtctggcaggcaggcggcgagaacaagtatgagatcaatatttcgtcggctacccttgaccgtcccatcgaggagaccgcttccaccctgctgcatgagatggtgcacgaatactgcatggagaccggcatcaaggacaccagcaacaacggggtctatcacaaccggcgctttaaggagcaggccgaggcacacggcttgaccgtcgaccaccacgaaaaatacggctggaccatcacgagcccgtccgaggagctgttggacttcatcatctttcaaggctggcaggatatccagatgggcgagcggttggcatggtcggatatggcaggcaccggagcaggcagcaaagcacccggcagcagccagaccggagcgcccaagcctcccaaggcaaagagcagcacccggcggtgggtatgtcccaagtgcggaaccatcatccggagcaccaaggacgtgcgggtcatctgcgcggactgcatggagctgttcgtgaaggctgactaaccatagcaggacagagagcgagggcacgagtgagagtagtgctatatataaaaacaggaggctcctcatggatacttataaaatcgctattgacacctttcttgccgagacatccgagtgcaaagccagtgggtgcaccgttttttccggggcagacatcgcgttccaagacatccagttgcacacgcaccggaacaagtcagagctgcatttcatggccgggcacaccatgctttccatcccccttgccagcatcctgagtatcgaaaagctggtactgcggggcatccagaccaccgagtatgaggtcactaccaaagagggcggcaccattacccttgacgttgtttaaaagcgtacccgtaaaacagagattcgccgggctgtgagaggacgcccattatttaaaggagagcagccatgaccattatatcagaacgtttgcagcaccttcgcctgacgcacggctatacccagaccgagcttgcccgaaccatgggtgtgacccgccgggcagtctacgcatgggagcacgacaaatgccccgagatccctcatctgatccagcttgctcaattctatcaggtgtcgaccgattatctgttggggttgacggagcgaggtgctccccgccaccggaggccttaccggatactttttgcctgctatagtgcggtcaaccatcagtccgcgcgacggcagccacaacgctccatatttttaacagcacacttgtaagtccatcttataggatgcatcgtttggtagacttcaggtacagcaaaagcaaacacacttcaaaatacaggaggataatattatggcaggcgctttttcgttatttttaggcatgttgggtcttggtgcagctggtgcagtcagcgcgggacagaacgcaaaaatcaagaaggcagattatcagtatggcgaggagcatggccttcatggcacctctgaggttctgcaaatgcgggagcgagtgcgtaaagaatggtggagcatctgcggcaagacctacaacgtatgtgaacggcctgcatacctcataaattgcttagagtttcaagttagcttttcactcgctttttactttatttctgtttttcgatatacctgatacagaacaggtaaaataataaggaatagaacggaataaattgttaaaataatcggaactgatcctatcactttcccaccaatttcataaagagtaaaggttttaattgccatatttatctgcaagagctggtctggcaaaaatcctaatacatctgataatactgaaaatccacccaaaaaggattgaatgaataacagtacaaatggaattgtaacagctaaaacagttgtatgtgtcttggcagataccagcatggaaacagctaaaatgaataatgctcccacatatccaccaatcacggttaagaggtatgcctgcaaataggtaatattgtaaaaacttttccagaaagcccagcttgtctgaataacacaatttgcaccgccaatacctgcaacactaaatactactgcggaatatatcagaattaccaaccagtaaactccggtaataacaatcaacccagccgctattttagaaaaagtccccctatttctgccataccttgcggaaaagaaaacagaatccgctttccacccaaattcgtttgaaaagatacctgctacaaagaaactcataatcaaaacggtcagcataatgattgtgggtgcatagtccaaagcagcagtaaaaccgcctgcatattcataataaaaaggagtctccagtttttgatattgactaaccagaaatgctttttccttttcactgaattggtcttttgcttcatcagaattaagccatttctccagatttaagatgcggttatcataaagctttccaacctcatcctctgataagctgtctgcccgatagtaattatgttctcggaactcggaaaatccagagttaattaaatccctaatatcagaaaatccctgttttttggaatagccaatgttgctggttttaatatctgtcgggctgtcaggataggtttcgttgattagccgattttgccgaatgacctctcgaagcacatcttctgtgatcaggccttcccattccgcttttgtatcacgcaagtaccttgctgccgcaattcctgtgtgtgtatccccctcctcatccacatagtccatggaagatattgcaaaatagcaagtaacagcgatggctgccagcaatacgatcagaccgattttatttgcagtttttgaaaatatcttttttatttcaaatcgaatcattccatgtcaccatccttttctccaaaataatacaaaaagacgtcttctaaattagggcgcacaagtcttgcatgttcaagcggctgcctggcagaaataattcgtaattcaacagtaccattttctgatttcatattagatactttatattgtttcatcaactttgctgctttttcatgggaagtctgacaagcccatactttttgcggcatggaagatacgatttcatctaaattcccttgctgcaaaatcttaccgtctttcataagccaaatatcctttgcaatatactccacatccgaaacaatgtgagtagataatataacaatacggttttctgacagctcactgattagattgcgaaaacgtattctttctgcggggtcaagtccggcagttggttcatccaaaatcaaaattttagggtcattcagtatcgcttgtgcaatgccagcccgacgtttcatgcctccggataatttccgcatttttttattagcagctttggaaagtcctacctgtgcaagtagtttgtttacttttttctttgccacaatcgggcgaatcccttttaaggctgcaatgtataaaagataatcctttaccgtaaattccggataaaatccaaattcctgcggcaaatatcctaaaagattccggtactcgccgcccattcccccaatatcctgcccgtcacataatatctttccacttgtaggggtcagcagtgagcatatcattttcattaaagtggtttttccagcaccattgacacctaaaagtccatacacaccatttgaaatcgtaagattcaggttgtttactgctcgaaaatttccaaactcttttgtcagattaactaattgtagttccacttaaatccacctcccaaaatttattacaatcaaatatggttttataaattgcaccaatcagaaaaacaacagcagttccaaacaaagcataccaaaccggaagtgtaatgagaacgtaaatgatttcgttattgataatgaaccaccatattccgctccataacaggcagagaataatagaagttccctcatttacacgactattgctgcacaacgtaccaaagcaaatgcaagcagtcaccacggctggaaacaaaaactggatgacaatttctgatagcgcgagattgacacttcctctaagtgtgatacaaaacaggcttatcataaataaatcgacaattccaaatagaaagattctggctgcatatatctgtcgcaatgaataaaggcaggtcgcttctatctgcatacagtcacaagatttgtttttccaaaattccggtatcatcagaacaataaagagtacccctatcatacctaacattcttatcacatacctattgtctaaaagatatggcaaaagggttgcagcagtccataacaaaagcatttgcagcagccaccaacgcttgcgtataagatgtaactctgtccataaaaattcccaatacgttagttgcttttcctgctcaacggagcaataactttctattgattttcttacggtttcttttatgtgctgttcatcaggaataatattctgattttcccgataccttttgagttgttcttcaatattcacaaaatcactcctcccttagcagtctttctaaatgtgtttttgcctgttttacccggtattttactaatggcaaacctatttgtaaggtgctggatatttctgtaagtttcagttcctgaaagtaatacaagataataacttcccttaattcagcgggtaatctatccagagctgccttaatcgtcagcctgttaagaagctcgtctgtttcagggggatgtaaacaatcttgaatttctaaagactgttcctctaacaaactttctcggatttttttataggaatccctgcaaagatttccagcaatcgtatacaaataatttttggtttttcccatataacggtagtcagacaatttctcgaaaaagcgcaaaaaagtttcctgtgttaaatcttctgcggttgatgtatcagggcaatgatagttacaatagttcaatatttccttatagtatttgcgaacaaatacattaaaagcattttcgtctccacgcttcattctttgtagcaacaaaaaatctatatccatgaaatcctcctttcccgttattgaaagtcaatgcgcatttctctttctaccatgtataacgaatgaacactgtaaaaagatagtgtggcttcattttttataaaaattttttccagatagattgcttatccctatttattatattgaattgcccttatagcttcaagatagataatttgacaccaattcatcacttgacattgtggcaaagatttggctgattttggctatgccggactttttggcaagggtcaaacgaaagttaccactgagatcattgaacgctgacgccaaccaccatttcctatagcagcaacagagctctgccgctcagacacgagtagcagggctccttttttacgcggtattcggtcaagaagtaaacttaaagagcggcgtttaatatcagacagcagatatcccggcagatttttggcttgattatcgctttcaccacttttgagcatatccatttgcgtcgtgaaatgcgacggaattatgagcggactttgattccagtcataaggtctgtcaaacacatctccacttgtggcgaaagtacagaattgaagcacggcgcacatttttgagaagggattggtagaacatttttgcgccaccaatagcgatttctgaaattttagaatacggtctttctccacttgcaagggaaatgttagtagccgaattttcggctgctaagggtagtcccgtttcaggatatccttgtctattgctcaattgtgagcgataggttcaaaggtcgcgttttgctacctttagaatcaaagggttgtagatttgtgggcacccggtcatagcacacttctgcgcacgatggacttttttgaccattgccacaagtggcgatgggagcgtaccagacagtacagggcagggagtttgtaatccccctcatgctgcgaacgaaacgtcgagcgtcttgacccgctttcaactagtgtcaaactgtcactagttgatggaaatagaacagtttatcgacaaatcagtcaccctcaaattgagggctactgacggaaaaatgtatgatacgattgttcttaatatgaagagtgtaatggagatctgccgtctgtcacgagcgtaacaaagacagtcttgataagttttcaaggggatttcaaattgaaaccgcctccttgagccatgttgcaggggggcgtggaatgcgactcccttttggcagcctaaaattcagtcatcaaacggtgtccaccacgtaggcagccttatatcagtcaacactaacgcgccatattttgattgaaattctttttttaattgtgtcaacccagataggacaacagcttgtgataccatccgccgggcagacgcttaccagaggccacacaatccacactgcaccactatttatcagatcatacacagacacaaacacttatttactaatcatcgacaaattcccagtgatcagataccaagccacagttaaacagtccgctttaatttttgatgacgcttcttgacctgcttgcagccaaacgtctctcatcgttttcaacgattcgttccgttttgtttcgagtaaaagagcatcacgagcaataaagcatcgctcacgctctgcttcattattcgtaatactcttttagctcaaaacattatttatacttgtcgaaaattttcactttttatattatacaatgtgaaaaaaatcgacagaatcatggttacaatcgatacagtgtccagaatgttgccttttgttttgcattgattcttttctcatccgattttacttctacaccatagtatatcaaatatcgattgacaattttcaaagaaggctcagatttatctttatgccgatcattggggttggtaatacagccgcgttcaacaagctcctttctcatgatctcgcccagaataggttttccaaggttctcttcaatatagtcctccatctctttgaaccgtagcggttcgattttactcagaagcgcatcactttctgcaacagcatacagcatcccccattgatagcctttttccatcatcagtttgagcgcatccatctgaacgaggtattgatgttctgcgcggcgtctccactcccagccattaccatattcatcgcggtcaaccgtcttgctgtacttatccagcatctccacgatacccggcttatgcaggtactcttgccacacctccggatcagattttccctctttccatttctttgctggctccagctgtctttttctgatatgttcgcgttcctgcttgatcctgtcgtggctgtaacctttaaagtacactgcgcaggtgtcctgtttgcttaccggccgctttcgtcccaagatctgcgcgtttacgattgggtcccacagtctactgatgatacagatcagttccgggtctttgatgttgacaccattgtaaaacacggtcgtcacgattgtaatcctcttgtgcagtttaccatcctgcagcacctcttccagcccatcaaactctcttgcttccgggcgatagggcgagcatgccgtggcgatctcacctgcaaactcgtcttctaattctttcaccagtttttttaatctgctcatccgatcgacgaataccagaaccttcccccgccttgcttcctgtcggattattttgatttcctcagcatctgtccagtaaaagaccgcacgctccacataactgtagtccgatgggatatgacagtagttctccggcaggacctcatttgtctcatcccgccaacggtgaaagaatggatgtgcggttgcactcataaagattaccgggcgatactttgtcagctcattcagcgtcacataggagaggtcgatgtatttattgatagctgcatccgttaacagataatggtattcgtccgccactatgtagttaaagcttttgaagtagttcattgtccccttcgggttgcccttgcagaacgactccatccactgataggtctctacccggatcgtatctttatatttattcgttactctggtttcgtaaacgatctgctgaaggtcatgatcccaacgcccgaccttctcttccgtccttccaagccgctccacctcctgttggatctcatttctcaggggaacacgattgcaaagatatataattttccagtgcttttgatatgcccatggcagcagaacattcaggataaagtaggtcttcccggagttcacgcccgcatcaaagactattctggtaccgtcacgccaatttttaaagttctccttcaccagctccgtgatgcgtatccgcttcggctcgctggccatctccgggatcactgtcggttcctccgggagcaacaaagcgccctctccctgtggaatagacgtttctttcgctacagtcacttctacctctggtgcgtcctctgcctcctgtccggtacagcacccttcctgcagctcggtgggctctggcgtctggggcctggatgttccctccgcctctgctgcctgtctggtgggctccggctctgcgtttatccgttccagctctgcaatcgctgcacgggcgctttctgtccattcccgctgctcttcctcggtcaacgggttctccttgcagttgcgtagatattcctcatattcgtgggttccgttctgttcatccaaaagcttcaagtagaagccgtcaaagggcattttcattttcatgtaataacctctataataatataaggcgcacagcccagccatcttgccagaccatgcgccggtttgtcagcgcctgccagaaaaggctctggtcaaacgcttcgttctgtgctattataggggcgggaacatacacacatagatttttcccgtctctatcgccgctttgcctgttgccgcaggtaaggcggtttttgttttactgttgcccatgggaccctgcctcgagtgctaccgccgcttctgcaaacctccgcatggcgctgctgtagccaatttcaaaggagctctcggcaataggcgcaaccagcccttccagaatttcagataagatcgcgttctgtgcttcacccaaatacggtcgaacaagcacatccagctgatgaaagcttgcctccacagcacttttgaacttctcttcattctgcttaatctcgtcagcggtctgaaatacatcttctaaaaagctcattttattctccttttttagcataacactgcctctggacgtcctgcccattccacagcctgctcatttgcttgggcgcgctgtacactgccggcagcttggtaaacagtcatctttagctgcggtgcgccgtccttgttcagccacggctcaacgctgattatcgtgttttccgggttatccggtctgtctgccagccgcattataaagccctcggcaaacgattttccccgctgaagcggtttcacacccccgccgtaacagagatacttgccttccagtccggcagacaaggttgcgaatgggtccaaatgttttagtgtatcgtcataaaatatctgcatagcattctccttcttcataacatttttattgtcaagcgccttgcatgtgctagacgttttttgtttgcttcggatcatgtctctggcacctcattgtccttgtgcccttcaagctcaacgcgcatctcaggggtcagcgttctggtaaactccaagtatgcctgaatccccagctctaccgcatattgctctgcttgggccatcagttctgccgacaaccgcgcgatcctattcttgtccgcctcatcaaccggaaggtcctccagcgccctctccagcgcgtctgcagccttaaccagcggctcacacagctcacgcgtttgccgtgggatgatcaaatatccttctgcgcccaacgatacactcaaaatgtccacgctgcaggtctcgttatccgtcataagcttcctccttgtcctttacattccacaccatcgtgccgcccggggattcacaaactccggcttgaacgtcacattggggaaattcacatccatatagtttccgaactcttccgtcgccgcctcttcgctgtaatcggccagtgcatccaccgtttccaacgcctgcaacagacgaatgcgccccgtattccggtcgtgccccatctgcacaagctcactatcggtcagttcattgcagagctcataggcggcagcgatatagctccgcagtacaggctttggttcaagccgcacctcataatagtaggtcggctcctctgccacctcctgaacgacagcctccatgctgcagcatatctccagttcagggttgccttctgcatctgaggtaggcgtaatggtcatatccgtaccatcgcaaaaacgcatcgtaatgcctttaccgaccgtggaatccctttgatccgggcagatgcatccgcccgccgggatcgttttcccggacagcgctgcgctcagaataagcgacgcttcccgctcttcttcaggtgtttcggcatggacctcggcaccgttcatgtagatatcgatcatagtcgtattcctcctgtttggttgattaaaaaatcgtatcaatgtccggatcgtccagctcatccagctcgtccatccagtcatatgccgtggagacaattttttcgtccgcatcattccggtagggtacagaatagcagtcgattttcagtaacgcccgtccatcatcgctgaggtacggcaagaaggtgatcatcatatcacactccatatccggctcatcggccagcttcaacgtaattccttcgcaggaattcagactgtggtggggtgtttctgtgcaggcatcgtagatcaaagccttcccttccagcacatccttcaacgcacatagcaccgatgcgtcattcttacggccattcgtccggatcgttactgcatcttcgtgattgtaattcatcattatacctcctgcgcgatgcgcgcacatgtaatttttttgcaggcttcttttgcatttgtggttagcatagtcaaacctcttgctcgtactgcagtgtcaggataccgctgcttgtcttctgttcacggcttcatcccctccatcatctcatcttccagtgcactcttcattacacgggcgcccatctcgaaccctttcatgaagcaaaattccattcccctgtgtgctgcctgtacagacagatagcagatatccgacaggacgctctgcggcatgtgtgttacccgcgcatagtctaccagatagttctcaaatgcgtctgcggcttccttgagctctgccgactctctgaggttcaccagatcattcaggttcacatagagttcctcctcatcgtcaatcaggttctcttttacgttattttcaaccatgttatagctccttttccttaaaattcactgttgagtgtcacctcggcatactgctcctcttcacggttctcgggcagaagatttgcatcattgaagtaaagttcgatcatatcaattctccttttattatgcacatttgttgtttttcagagccatggcaaaggccttatccgccgggcagatggactgcagcagcccccgcgcctcgctctccaaccgctggagctcggcacgcatctgctcccattccttcagctccccgctggcgaccccctcacgaattgtgcgtcttacagcttctgccagtgtctcctccagccttgcatgataggtacaaatatcgtactccaccccaccatcggcctttgtatgcgcctttttcaacgtgtaatacacgctgctcgcgtccagataataatccttccaaatttccaacaatctattgcactgtataagcaaaaagcccccggcataccgccgggagcatagcataatctaacagaaaattattctcttttacgaaacagtgcaaagtgcaacagagtatgtatctttgcttgcaaaagtgaaggttacaacaaagtttgctctcaccgttgcaccatatccgttttgagcatcaacccagcccttgacagtccatgtgttgtcattgcgtccaatcgttgcttctgttgtcgtacagaactgtgccgtcgaaggggactttaatttatcttttacagcattttcagctattacaaaagcgtcaaacttatcatgtccatagcgatcctttccgtttccgttagcgataacgtcagaacttgtagaattcattctattgttcgtgctgttattatcgcttttattctcactagaagaatatcttttatcgctccattctttcatttcttgacggtaattacttctttctgattcgctacgaatttcaacttcatcattatttatgttcacattataccactttccatcactgtaaatatcttccaataaaaacaaacatgaaccgcctgttcctttccaagcatttgtaacagcattaaagaaaatatcgtgaaaccctttatacaacttcactatgtcgttccttgacattgattctaaggattttcctttgtaggaatcgcactttaccgatacatcataataagtattataaaaactatctgcttcaaccaatacagcggcgttatcaaatccgtagtcctccgctagtcgctttgtcacttttattgcaatctcatcaaatccgctcttatcatctaacagcgcatatcccagtattgactgcctaacagcctcttgatattgcccaccctcaaataaatcttcactctctaataggtaatccgctggaatctgcgttatatactgttgtgcagtttcataacacctatcttttttgattactcttgcatacattctatatgcttgtgttaattctccctccaatcgaagtttttctgctgtttcaaaacagtgttttgatatttcaagggcgctcaactggctttccacatctttgaatgtaacattttcgcccaacatttctttatacgtttcaaagtcatcattgattttttcttccgatagttctccgttattgtagctttctattagattttcgagatatggtataaacttttcagcaaagctactttcatattcttccttccctgaaatcttctcagcataaatttgttgtgcttgttcaatgtccccgtttttcaccaattccattacactgtctgatgggtcagaaccactgcacccagtaagcaataccgcacataaagtcgccatcccgaccatcaaagttattttccgcttcacttctacaatccctttcctttctatgtttcaaggcttctttccccgattataacatttcctcggtaatcagtcaatcaaactatacatatatagataatttattatcattctctgtatagtaaagtagatataaaggggtgaagatgatgattgcagataacattaagcgtcttcgagagaatgccggcctttcacaagctgccctcgctcgcaaacttggtgtaacacgcgccagcgttaacgcatgggaaatggagctttcagcgcctaccgctcaatatcttattgctctggcgcaattattccacactacaaccgatgatatattaggacttaaatcccaagaccaaattgttttgcgagatatgaatgaacaggaaaaacgtttggtttatgatttagttgcttatattgcatctcgcaaagaataaatcccataagggcggttgcatcttatcttgcagcctccctttttatcatatctttcaaacacataaaaaacaccctttccttcatggcggaccacaaaagaaagggtgaaaaattgctagataagcttatcgtaccaaatcaagcttgttcgtagttgaactagacaaaccccggtcgacaaatcatccaattttgagcgtagagctgtgattagcagttctcagcgaagtacttaatggtacggaccatctgagaggtgtaggagttctcgttgtcgtaccaagacacgacctgaacctgataggtgtcgtcgtcgatcttagcgaccatggtctgggtagcgtcgaacagagagccgtaacgcataccgatgacatcggaagaaacgatctgatcctcgttgtagccgaaggactcagaagcagcagccttcatggcagcattgatagcttccttggtgacatccttgcccttgacaacggcaaccagcagggtggtagaaccggtgggaacgggcacacgctgagcagagccgatcagcttgccgttcagctcggggatgaccaggccgatagccttagcagcaccggtggtgttgggaacgatgttctgcgcgccagcacgagcacggcgcagatcgcccttgcgctgaggaccgtccaagatcatctggtcgccggtgtaagcatgaacggtggtcatgataccggaaacgatggggaaggtcttgttcagggcgttagccatgggagccaagcagttggtggtgcaggaagcagcggagatgacctgatcctcagcggtcagggtcttctcgttgacggagtagacgatggtcttcagatcgttgcctgcgggagcagagataacgaccttctttgcgccagcctggatgtgagccatgctcttctccttgctggtgtagaagccggtgcactccagaacgacgtcaacgttcagctcgccccaaggagcatcctttgcgtccttaacagcgtagatcttgatctccttgccgtcaacaatgatggaatcctcggtggactcgacagtgtgcttgccctcgccgatcttgccgcagaaagagccctgagcagtatcgtacttcagcaggtgagccagcatcttggggctggtcaggtcgttgattgcgacgacctcgtaaccctcagcatcaaacatctgacggaaagccagacggccaatacgaccgaaaccattgatagcaactctaacagccattgtaatagtacctcctaattattttacccataatcggataaatcacggtatctttattgtagaccaaaaccggcaaactttcaagtgtctgctaaaaaattaacaacacaattttatctttttttgcttttgtatgattttatgcaccctgccacaaagcttttgttcaattacaccaagagtgcacagccgtttttgtcagttatttccagcgtttccctttccaatgcagtcaagccccatgccgccgatgcagcacagcgcaagaccggaaagcagctccggcagcaccgccgcagcgctgccgctaaagcctgctgccaacagcaaaaatacccggggcagttcccagcacaggcacaggcagaaggctgcaagcgccgcagcgtgcagggtgcggccgttttccggttggggcaggtacagcgtgcgcgccagcgccgccagaaacaacagcgccgccagctcctgccagaccgctgctgtgggctgcaccctgtgccagctggagctgttctccataaagcgcatcagcacgttccagtaaaacagcgcactgcccgctatggccagcggcagaccgccggcaggcgttttccagccgtccccgcgcagccagctgcgcccgaggttgctcagccacacggcacaggctgcctccagcagaatgcgcacaaaagtgcttaccgtaccggcagcaaacacgaactgcgccgcgccggcagccagcatacacactgccccggcaaaggccagcacgcctgccgccggacggcggctgcgcagcggctccgggggcagcgggcggctgcggccagccagcactgcggccagcaccacagcgcccaaggcaagataccgccaccacaccgcgcctgcggtgcacagaccggtggcggcgtccgtagcaaaggcaaggtctgcgccgcggccaaggccaagcagcacgcagagcaggataacaactaactctaacggtttcattaacgctcctcgatgggcttatatttctggcgcacgcccagatacttgtaggccgggcggatgatacggttggcgaagatcacctcttccacccggtgtgcgcaccagcccggcacacgggcgatggcaaacagcggggtgtacagatcctccgagatgcccagcatattgtagatcaggccgctgaacaggtccacgttggcgcacaccggcttggagctgcccttttcctcggcaaagatgccgggtgccagccgctcgatgctgcacagcatattgtactcttcctcaaagcctttttcgtaggccagatgctttgcgcgctgcttcaggatgacctcacgggggtcgctgatggtgtacaccgcatgacccatgccatagatcaggccggagccgtcacccacctgcttgcgcaggatgcggcgcagatactcgcgcacctcgtcgtcatcctccgggttctcaacgtgcttgaggatatcctgcagctggcggttgaccatcaggttcgcgccgccgtgcttgggacccttcagggcaccgatggccgcagagatagccgagtaggtgtccgtgccggaggaggacagtacgcgggtggtaaaggtggagcagttgccgccgccgtggtctgcgtgcaccagcaggcacatatccagcagctttgcctcctcgtgggtaaacttctgatccgggcggtaggtgctgaggatgtgctctgccgtgctctggccgggcttgggcaggtggaagaacatactctgtttatcgtagtaacggcgcttcatctggtaagcgttcaccatcatagtgggcatactggcgatcaggttgatgctctgattcaggatgttctcaaggctcagatcctcagcgcggtcgtcgtaggagtacaggcccagcacgcagcgctgcaacttgttcatgatattgggcgagggcgcgttcatggtgtccataaagccgtccggcagtgcgcgggactccgctaagatttcgcagaaatcgtccagctgctcccgggtgggcaggctgccgaacagaagcagccagatcacttcctcaaacacgaagcggtcgttgcggtaagcctcgtccacgatttcgttgatgttgacgccccggtagatcagcttgccgggggtggggatcacatgaccttcctgatcctttttgtagcccacaacatcacagacgttggtcaggccggccagcacgccggtgccatccgggttgcgcaggccgcgcttgacccccagccgctcgctggtctccgggtcgatgtagttgtttgcgatgtactcctcgcacagggtacgcatggtcgtcgggtccagcgttgccacttctgcgtgtgcaaagttcataggagtgctcctttccgtctcttacttcttatactttccgatcccgtccatcctacgctctgatggacatacttttataatatcgcttttgtgcagtaaattcaagcgctaagtgcgcacttctcaccgtaaagcgcaaaaatgcaggtttttctctgcgcatttcccgccggtttgcacgccgccgggcgtatgatgttcccaaaacctgcgttccgggaggaggtctagtatgaaacgttcctttttgctgctgtgcgccgttctgctggtgctgggctgcgccctgccgtgtgctgcctaccgccttgcccgcatgacccttgcgcagagcaccgctccgtccgcagcagaagcatcctctgccgcttcggaagaaggcagcggtcaggccacctcccctgctgacacagccgataccgtctgctttacggatcagagcaccgggcaggcggtggagttgccgctgcgggagtatctcatcggggcggttgccgctgaaatgccggtcagctggccggatgaagcactgaaggcacaggcggtggcggcgcacagctatgccctttaccgccgagaccacaacacggaggaaaacggcgcatggttcaccgcagaccccgcccggcggcagggctgcctgaccgatgcggtgctgcacagctactggggcaccgcctacgcggccaactacgcccggctttccgcgctggtggatgcggtacagacgcaggtgctgtattacggggacgcccccgccgggacaagctactttgccatgtccaatggccgcaccgaagccagcgagaacgtctggggcactgccctgccctatcttgtaccggtggacagcagcaccgacaccgccgccgacaactatgaatacaccctgaacctttctgccgcccaattacagcagctgctggccgaacggctgggtatcgccgctgatctttcgcagcaagcgcagtggttcggcacgccgatgctcaccccctccggctatgtagacagcctgtcggtctgcgggcagacggtgcagggtaccgccctgcgcaaggcgctggggctgcgcagcacctgctttacggtggtctggcagagcggcactttctcctttaccacaaggggctacggccacggcgtaggcatgagccagtggggcgcaaaggcgctggcggagcaaggcgcagactaccgcgccattctggcgcactactaccccggcacggaactgcgggggtaagccaaagcattattttatatttcagggctgttgtactcggtcaacgggctcgccctctcagtcacctacggtgacagctctcccaaagggagagcctttggcagtccacgcaaacttcatctctttgccaaggcctctccctttgggagaggtggcacggcgaagccgtgacggagagggcgaggacgctaaaacaaaactgtcgcaacctccttagatggaagcaaatagggccgctgcacattgccttgtgcagcggctccaaatttatatccttttatcagccgaacagctgtgcaaaccagcttacggtggtctcggcggcggtctctaccgtggtctccacctgctggaccgtctgctgcagcttggtgccctcggcgtccttgagcgaccagtaggtctgggtactgcttgcactgccggacaccgtgaagtccgatgcaaagcacaggctctcgcccgcagagtccgtcaccagcaccatataggtgtagctgccctccggcagctccccgaagcggatctggctgtccagcgtgttcagagagaaagcggcggcgttcacctgtgccgccgcgctctgcacagtctggtcagctgcgtccagaaccgccacctgcacactggtcagggtagtaccggtggcgctgttggctgtaccggtcagtgtcatgccgctgccggtgcgaagatttaccgggtaacgcaccccttccaaccgcaggccgtcggcctgtgccgccacgctgttatgatctgcggtgacgtaccagtagcaggaagatcttgcaatggacacgctggagcttgtaatagggatgcggccgtagccgatgttccccgccgggtcggagcaatagaaaataccgttggtgtagtcggtcagcagcaccgcatggggctgggtacggtcgtaaagaacgatgccctccgggtgctgctccagcagagagatcagcaccgccgttttgctttgcaggctggagggcagggtggcgtagcccacctgcatttccttatatgtaaaactgtgcgcaaggccgttggcccatgctgtggagcgcacactgttctcggtcacgttcgtccaatcggtcagcccgtcaaagtaggcacggcggcgcagcatcatggctgcggaagccagcgtacaggtgccgccccggctctgcttgaagtagaagcctgcgtccacgttcagatccactgccagtgcagcgggcagacaggtaagcagaaaggcaaagctcagtatcagggtcagcaatcgttttctcagggtgtgcggtgcggtggtattcacggttcggtatttcctttcttgtttctttgcggatctcatagggatctaccgctaaaaagtataccagcctgtaatccttttgtaaacaatcttccgtctattttctcaatatcaacacgttttggggatatccgttagctgcttttcacaaatttttctgcaatattccacgcatctgacaaaatttcgtcctacccaccgcacaaatatgaaaagatatttcttttttcgcccgtttttcgggtgccaaactgcaaaaagcacccgcagcattctccctgcatttcattgcaaaaaacgggaaactgctgcgggtgctttattatttatgcttctgacaggcgttcgggtcacaaaattttatgcagctcctgcacaaggtcgccgatcacgatgggcttggacaaaaagccgttcatgccgctttccagcgcgttgcggcgatcctcgtcaaaggcgttggcggtcatggcaatgatcgggagcgttgcccgggcagggtcgtccagcgcgcggatcttccgggtggcggtatagccgtccatgatcggcatctgcacatccatcagcaccagatcatagctgcccggcgctgcggtgcttaccttttccaccgccacagcaccgttttcagccgtatcgacaaggaagccgtactcccgcaggatctcctgtgcgatctcacggttcagctcattgtcctctaccagcaggatctgcttgcccttgaagtcggcgttcttatccggcagaagcccctgcgccgcatccgtctgcttctgaccaagggcgctcatcagggtctcgcgcaggtcggacatgaacatgggcttggcgcagaaggcggtcacgccggcggcctttgcttccacctcaatgtcagaccagtcgtaggcggtcaggatgataatgggcgtatcatcgttcaggctgcggatgcggcgggtgacctcgatgccgttcatatccggcaggcgccagtcgatgatataggcgtggtaggcatcgctcatctcgatagactgtcgtgcacgcaataccgcttccttgccggaaagcgtccactcggcgcgcatacccaccttgaccagcatctttgtcacgctgtcgcaggtgttgaagtcgtcatccaccaccagtgctttcaggccttccagctcggtgatcttttccaccgggcgctgctcagtctgtgcgcgcatgggcacgcagacggtaaactcggtacccttgccctgcgctgtctgcacctcgatggttccgcccatcatatccacgatgtttttggtaatggccatgccaaggccggtgccttggatgcggcttaccgtggaggtgcgctcccgctcgaagggctcaaagatctttttagcaaactccgggctcatgccgatgccgttatccttgatgcggaactcgtactgcccgcagccatgcaccttaccggcaagctgccgtacccgcaccgagaccgtgccgcccgccggggtaaacttgatggcgttggacagcaggttcagcaagatctggttcagccgggtcttgtcgcagtagacgtcctcgtcggtcacgtccatgacgtccatgtaaagctccagctgctttgcaaaaatttgcccgctgacaatggttttcaaatcgtgcagcacatccgaaaggttgacctccacctcttccagatggatctttccgctttcaatgcggctcatatccagcacatcattgatgagggaaagcagatggttgctggatgcaagggtcttgccaagataatccttcacccgctcggtatcgttgatattgctgagcgccagcgtagtaaagccgatgatggcgttcatgggggtgcggatatcgtgggacatattggaaaggaaggtgctcttggcgcggttggcggtctcggcggcggcaaccgcgttggaaagcgcctgattcacctgcttatcggcggtgcggtcggacaagacaaggatatacttggctctgccctccacctcgctgcctatggcgatgatgtggaaccagcggcgctccttagtctcccgatgctcaaactcgaaatcccattcgcgctgctgcccgctgagcagccctttcagatagtttttgtcgcgctccggggaaccattcgggtgcagcgctgccagaacacgggcatcctgccggacttctctccacgggatgcccagcagccgctcaatgttcgggctgacgtaatccaccttggaagtctctgcgtccagcatcaggaaaacatcatccacgttacgcgaaagcttctggaacagctcgtcccggtacgagatctcggtattcttccggcgcagggttgtatggcttctgcgcacaatgagcagaatgaccagtagcgcaagacctgcaacgatgcccgccacgatctgcaccgtatgggaccacagctcgtccagactggcattgacaatgctgaccggcacaagccccaccatcgtccagttctggaccgcagtgccctcgtagaccagataatagctggtgtcgctcagtttgaccctcaggtttccgctgctgccctgcgcaaaggcattggacagctccgtaatctgttcctcggaaaggtcggaatggtcgcgcagcatcgcaatgaaattgtaaatggtctccttgcggtttacggagttgtcgatgaccacccgcccgtccgggtagatgacatagttgctggcattgccctcaaaggcagagttgtccagcaatctcagcaccgcatcattataataagagatggcaatggcatcgtaggcaaagccccggtagctgccctgggtttcgggacagatgaacgcaagcatctggggcttgccgggcagcgccgtgttcacaacgacatcctcatcatgggcgagcttttcgtccagattggtctgcaagccaagatagccggtttccccggtcacggtgatgtagttgccgttgtaggtaagaaagtaaaagttggcaaatccggtattcttctgtgcttgctcgatatacgcctgaatttcgtcctcgtccgaggtattttccaaaaagccgttgtacagatgcagataggtcacatttttgcgcaccatctcttttagcatattgttggatttatgcagcacttcttccagatgcgaggtgctttcctgatagatggtctgcgacacaaacgagatgtaccgcacgctgagcccgactgccagcaagaccagcagaaggatagcggcagcagcagggagccacttttgccggggatggcagctccgttttggtttacgcttttcgtctgccattccgctcacctcagtgtcatgtagttttcaggctctgcaagcgctgcgccgccgccggagacgtgatcgcgccatgtgtttttcacccacgcgtctccgtcctcagacgtgccgctcttgctcgcaagcagcgcttccatctgctttgacgttgccagacaggtcacagtaatggtgtcgtcatcccgcagcggctgcccgttgcgggtgataccggtcagggtatagctgccgttattctcctttacctccacggcaataccgctgactatcggcagagagccacgattgaagggcacaaagccgccctcgcagccttccacaaaggcgcggacagtttccttcagctcagcgccggtcatggtgcgttggcgggacatcaggccgttgggcatgatcatggaatccgccattttctggttataatctgccttcagcacactgccggtaaagctgtttgcggtggcaagcagcacatccgtgccgtaaacgccgcgcagcgtgtttgccataacggagaaggcggcattgccgccgtttgcgtggaacacgttggaatagctcttctcgctggtcaacacggtctcgtccgcagcaggctcctcttcggcaagaagctgcgcattgaacgcccggtaagcctgttttgccgtgtactcgcccgcaatcattctggagaccacatccttagagatggcaaagaaatcgttggaagcaatgcggatatacatatggttttcttccaccacatcgcgcacgtccttcatgtactcggtcaggcgcagggggacgttctggctgtagctcagcacgtcctgcccgtcggcaacgatgcggttctgcgcctcctcggagagcatgacgttcagcaccttcatggctttttcgcggcgcgcggtgtcctgctcgaggtcccggttcagggcaacttggaaatacggggtggtcatgatccacttttcgccgttctggcagaagaagggcataaaaatggtgtcgatgccctcatcctgaaacatcttcacgccggcagagctgccaaagtacatggcaacttccccgttccggaacatcccggtcacgtcgtcgtaggtcagggcaaggtcgtccgccgtaaggtgggtatcctgaatgaactgctccatccgctcaaaggcccccggccacacggcatcgtccagacccacccgcacggtgctggcggggtcgctgtaagcggtgcgccacttgcgcccttccgtagtggtaagctcggcggcggaaagcccctgcagcgtttccatgcagttgtaatcgtaggcatagtcagcggtaaagccccggatgcctaccgcttcaaacgcctgacaggccgccacaaagcttgcgtaatcggcaggcagcgggatatcgtactgctcaaaaaggctgcggttgaccacaaagccgtgggcatccgcacacaccggcagccagttcacactgccgtcctcgtttttaaagctgttgaggtaggtgttgtacacagcgcccgcctcgttggtcagggcaaggttcatcagactgtctttcagcggggcagcatcgtgcagcgagaaccggcagcaggtgatgatatccggcaggccgccgttctgctgcaaaaacttgtaaaaatccagatcgttgttgcctacgatgaactcaatattcacgtccggcagctgcgcttggacatagggagcatagctttcgtacaggctattgctccacagatacaccttaatggtctgggcatcctcctgctcctgtacctgttccgggctttttgtgccgcagccggtcagcagggacagccccagcgccagtaccgcaagcacggaaataaggcggcgcaatgttcttttgttcgtcaaattcattctcctcacaactcttgggcagctgccgtttttgcggcaaagctgctatggctcaccaatcgtacatcaccgcccgcaagagtgtgcgctttaaaacccgcccacggaaatgatgccgcaattttttgtgtgcttcctgttttgcacttttcctttcccgcgaaaaggcacagcgcaatagagacatacaattattttaccattatcaggaagttttttcaacaaattttcacatatttatccataaaaaccacgcgtatccgatttctttgcggcagctccggcatcgtgctgcaatgaccgggagggttttaggttttgccggtgcaaagcgcctgccagcgctccgccgggatgacaggctctgtgacaaaggcttcgggatttggggcaagaacatggcgggtgacccgaaaaagcccctcagcatcgcacaaaatgcaggctgcatcgccgaatttcgtgttccgggctgcgccgcagtccagatacgcctgctccagcttgacgaaatcctccgagatgtgcggctgctgcgcgttgtagtggcggcgcatatagacggtgtgctgcgccccggcttcgtccgtcacggtcagctgcaggggcttgtcggtcaggcggttcgggacgttcagcacctcctccacgctgtggataaaggtgttgcgggcgtgggtcacccccagcagcagcaccttgccgtgagctgcccgtaaccggtcgtagcagccgccgggggtgcagggggtgttggcgtccagctccccttctatgtaagcagccgcgtccttgccgtaagccgccatgctgtgggtggggtgcaacgagcgcaccaccccggggcgctgccggaacagctccggcagaatgcccacacagcacgggctgcggcacacatcgaacatccggttctcctcattgataaaccgccatgtgtgggtgggcagcagcagcaagccctccgcaaaaaactccatcagcgcgtccagaactgtgtccgcaccgccctccaccgtgccgatggacttcatggaagaatggatcaggatggtctcgtttcctgtcagccccattgctgcaaggtcgtgcttgaggtcagcctttgtatatgccatgtcgtctctccttttcgggcgttttgcctaccctcagtttaccgccttttgcgcagcaaggcaagcccgcagcagcacagtacccccgcaacacacaaaaaagcacatttcctgctgtattttccggtaacgctccggtgtatgcggggtatttagcccctttcagcctttttagcaaaaccttgtatacagcattttatcccgccgtgctgccgccataaaaccgcagcgctttgcaattatagcatttgacagttattttctgttttctttgtacattccgtacaacatccgctttatcacggcattccatcagcacttttcccgcattatgaagtggtatatcaatcttcccgtttcataagcaactccgtgcgtaagcgcaaaatcttgtatacaagccgtcaaataaagttccattccagcattgacattcgtttgccgggacggtacaatgatattaagcttaatttaccggataaatggagaacgactatggctacattacagcacacggatgagctttatcatattctcgaggacgagatctgtaccttgaagatcctgcccggggaagcgctgagcgaaaaccagctgtgcaagcggttcggtgtttcgcgcacccccatccgcagcgttttgcagcggctggagcagaaccgctttgtgcagatcatcccctgcaagggcaccatcgttaccgccatcgacatcggcgtggtggatcagctcatcttccagcgtgttgccgtggagggcatggtgttccgggattttgtgcagagctgctcgcccatggagatccttgctgtggagcacctttataatatgctgctggaggccgctgcggggcgcagtgacccggaaaattttgatttcaaccacttcctcagctgcgaccttgccatgcacgagtactggttccgcaaaaccagcaaggagtacctttgggagcagatgacccgcccgcaggcagattactcccgctttatccgtctggacatcgtgggcgcacgcaacgtgtccagcgttgtcagcgagcacgccgagatgctgcgtattctgcgggagaaagatctggacgccattgagccgctgatgcgcacccacttgtacggcggcgtaagccgcatgggcagcaagatctactcggacgaataccgcgtctacttcaagctgccggaaagcagtaaataaaggcagccgcacaaaacggttttcaatgccctccgcttgcgctctgggcatatttaaaggaatattattttatcgcaattttcagaaatagtgtctatcaaaacagcatatttgcgatatgcagtttgcggatgttgcttgtgcattaaaaatgcaaactgctataaaatctttatcgaaccactcgcctagcgagtggttttagaaatacaaaaagccgcttctcagcggtccttctggcaaaagaatacgccctgctgttgcctctatcaagaagtttaggcattttcggagattttgaaaaagatttcgctttcgggagccctcaaaccgtcaccccagtgccacatccagcaccatcatcacgctgaaacctaccgcaaaaaacaccgtgccaacgttggagtgctgcccctgcgacatttccgggatcagttcctccaccaccacatacagcatggctccggcggcaaagctgagcagatagggcaaagcgggcaccacgatgcctgctgccagaatcgtcagcactgccccgatgggctctacgatgccggacagcacgccgccccagaacgcccggcctttcttcattccttccgcccgcagcggcatggagatgatggcaccctccggaaagttctggatggcaatgccaagggaaagtgccagcgccccggcggcggtgatctgagcagttccggcaagatatccggcatagaccacgcccaccgccatgccctccgggatattgtgcagtgttaccgccagaaccatcatggtggtgcgctggagctggctttttggcccttcggcctgcaaactattctggtgcagatgcgggatgagatgatccagcagcagcaaaaacaggatgcccagccagaagcccaccgccgccgggaaaaacgccagcctgcccagatctgcggcctgctccatggccgggatcagcaagctccataccgatgccgccaccatgaccccggcggcaaagccggtgagggcgcgctggatgccgtcacgcaaagagttttttaaaaagaatacacagcctgctccaaggcttgtgcccagaaacgggatcaagatcccccagaatgcgtcttgtatcatgtagtacctcctcgcggttattcgtaactaaccatatgaaaagtatactgcgctccggcaaaaaggtcaagggcttgcagcataaagagcgtaaacggcaccttttgcccacaaattaacctctgtaaacatccccgttttttcttgacaacgctttgcaggtgtgctattttaggtctcgtcaattagcttatcctaaccatctgaggggctttgccccgcgggtttttctttgcgcgcaatgttaggtgatgctaactacatgatccctatcccctgccagtgtgatgaaaggagcattttttcatgagaaccaagaaatttctttccctgctgctgtcggcggctatggcgttcagcctgctgaccgccactgcctttgcagcagcccccgccgaggaggaaaacggctttttcgattttctgctgggcaaaaagtacacctacctctacgctgccctgacttgggacgagtattgggcaaacgagaaggtctatgctgccggcagcactgccgcttctgcgcagctggacagccacgaggagcacgaccttggcgcatttgacgccgtttcccgcgctaccgccaaccatggtctgcaccgcggcagcttccagagcactgctgtcatctacgccaaggacggcagcacctacaccgtttcccactggtcggacgatggcaagaccatctatctggccgatggcactaccgtaggctggaaccgcggcaccatcactaaggccgatggctctaccgtgcagatggaccattacgaggtgctgggcaccaagtatgtgccggtgcgcgtggctaccagcgaccttgcagatttctgctccaagtacaccgttgtggaaaacggcggccagctggtgggcggctactctgaaaagaacctgaccgcctacaccctgacggctgcggtggacaagaacaccaacggcctgaagtatgcaaccaagagcggcgatggctacaccttctccgccgcacacaccggcaccggttccggcgtggcagaagccgcccagaaagctgctgatggtcttaccgtgaacctgcgcagcggcagcgatgtgggcagctttggcgagttcatccgtgtggacctgaacggcaactacggcgagctgggctcccggatgcagtctgtggtgtggacctactacggcaatgacagcacctacacccacgccaaggcctcctacggcaccaagtttgcagccgacaactggatgcacaagtccatgggcatccagctgggtctgagcgattccgcccgctgccagctgccggaaggcaccgacggcaccggctactggaccatcaccatccgcgcactgggctatgccgacacggtggtcaagttccagaccactgccgaaaatcttgccaagcacgagctggcaagcgatgccgaccgcgccgccctgcaggctgtggtcactgaagcacagggcaaggcaaaggccgcttacaccgccgacagctacgccaatctggagactgaactggccgaaagcgtggagctgctgagccgcgaaaccttgtataaggccgctgcactggagcaggtgacccacctgaccgatgccgtgcagaacctgaaagctgcctgatccggcaaaaaacagaatacccaaaaagcaaggtcgctctatgcaggcggccttgcttttccgtgtcaggaggagttggaatgaacaaaaaacgaagcaacacgctgctgccgctggtgcagctgctcccggcggtggcggcagcggcggctgtgctttttgccctgccgcgcactgtgccggtgctggctgccgtgccggaaaggctgacagccgtggtggagcagccggtggaagccgcttcctccgaagcggaggaagaagcgctgcccaagctgccctatgctgacggcgtttacgtcggctcttcccggggctacggcggtaccgtccgggtgcaggtcaccatggaaaacggcagcatcacggaggttgaaattctggatgcttcccacgagaccaagcagtttctgcggcgcgcaaagcggcttttgactactgtagtggatgcccagagctgggaggtggatgccgtttccgaagccacctacaccagccggggcattctgggcgcggtgcagaacgccctgaccggcgaggtggtcaacaatcccctgccgccgcagcccaagcccgccgcaccgctggtggtggaggaattcacagcgccctccacttaccttgacggcatctacaccgccgaagccataggctttgagggcaaaattacagtgcagatcacggtggcagaggataagatcacggatatcacggttctgagcgctgaggacgaggaggaatatctctcccgggcaaagcgggtcatccccgccattctggaggggcaaagccccaatgtggatgctgtttccggtgcgacttactcctccaccggtatcctgaacgccgtcaagctggcgctggcaaaagcagcggttgccccggcagaggaaaccgacccggagcaggccgcatcggaagagacggcagaagcaacagaagaagccgcgccgtccgaagcggcagaacccgaggaaatgccggtcaccgcgcccaccgtggaggtggtgcagccggaggaaaagagcgccgttcccgcgtggctcaaggaagtgtggcagcagcttttcccggcagatgcaccggacgattctgaaccggcttcctctgaggaagtgctgccgacatccgagacggcactgccgccggaagagaccgaaaccaaacctgaaacggaaggagcagcggaatgaaatacaagaattttctcctccgggcggtgaacctgctgctgatccttggcattctgtggcaataccagcaggtggcgctggtccgggctgcggcggtaagccagcgcaagcaggaaattgccgaggtggaagcctacaacgcttccgttttgcaggcgcagagcgcagcgcaggcggagcagagccaaagcggctaccgggacggcacctacgagggcagcgcctttggttttggcgatgtcatccgggtgtcggtaaccatccagaacggaaaaatgaccgatatatcggtgctggatgcttccggtgaagataagccctactataagcaggcactgcctttgctggacgagatgctggcggtgcagtctgccgaggtggataccgtttccggcgctaccctcacggcagaaggactcatcggtgcagtagaggacgcactgggaaaggcggcaggatgatggaaaaaacacaagcgaagcctttaacggcggcacagcagcgccagcgggacaaaaagcgccgcacatggctgcgcgccggggtacagctgttcttctttgtgaccatgccgggcgcattcgtggccgggttttccggggtaaaacagatttttctgcacatcggcgcaggcgaggtgctctcggcagacagctttacgctttccctgctggggctgtgcggcttcacccttttgttcgaccggtttttctgcgggtacgcctgcgcctttggcagcttgggcgatgccgtctgggcgctgtccgggctactccagaaaaaactgtttcaccgcaaaaagcagctccgtctgccggagcgggcggtgctttgggggcagaaggtcaaatatctgctgctggcggggctggtggcgctgtatgtgacccggcaggaaaagctgttgaccggcgcaagcccgtgggaggtattttcccgcctgacggctctgcgtctgccgccggagggcttcggcgtgggcattgcgctgcttgtgcttattttgctgggaatggcagtgcagccccggttcttctgtcagtttctctgccccatgggtacggtgttcgccctgctgccggtactgccctttgcacggctgcaccggcagagcgagagctgcatcccgggctgcaatgcctgcaaacagcagtgcccggtgtgcctgaagctggaggaaagcagcctgcgcagcggggagtgcatcgcctgtgaagcctgcgtgggcacctgccccaaacagaacatccaccggtgggataccgccttgtgtaagcaccagtggctgccggtgctgggtaaggcgctgctctttttcctgctgggctgctggctgggcttctgccggtttatctgaaacaaaaaggaagccgctgcgcagtatttgtgcatcagtctccttttttgactaggacgattttgaatgccctccgctatgctctgggcattttcagcggaaaaactatttataatttcggtacgccggagcgtctgcggacgctccggcgtaccattttcacgggaaggggcgcggccggaaactgtatttgcacaccttaccgggctcgccctctaaaagtaaaagcatctgcaacgaattcgctgtgttctgaaattcagaagcgaatgttgcagatgctttcttgttttatgcgagattttcggttttttatccttcgttcttctgctccagcaggtctgtcatgctgcgcaggctgatgccaagggtggaaaggttatgcagcatcgcgctggtggcagggggcaggatgcccagtgcgcccagaaggatgagcgcggagttgaagctgaggacaaagcggtaattgctgcccacccgcttttgcagggcgttggcaatggcttttaaggtcaccagctcttccagactgtccgcgcggatggtcacatcggcgatctcccgggcgatggcggcaccggaatggatggcgatgccgatatctgccgccgacaaagcaggcgaatcgttgatgccgtcaccgatcatcacaacggtgtgcccttcggccttggcgtcacggacaaaggcggctttatcctccggcagcacctccgcaaagcagcggtccacccccacctgcgccgcaatggcgcgggcagtgcggtcgctgtcgccggtcatcatgaccgtctgggcaatgcccagcttccggagcttatgcagcacctgtgccgcctccgggcgcagggggtctgcgatgcagatgacccccgccaacaccccggaagccgccagatacaggtgggagtactgcgggtccagtgcatcgaactttgcctgttcccctgccgggatggtgcagccctcgtcctcaaaaatgaagtgggcgctgccgatgaccacccgcgtgccgcccacccggctggcaatgccgtgcgccacgatgtactccacctcggagtgcatctcctcgtgggagataccccgctctctggcagcacggacaacggcgtttgccatggaatgggggaaatgctcttccagacaggcggcaagctgcaatacctcctgctcctcacagccggagaaaggcactacctgcaccacctgcggggtggcgcgggtgagggtgccggtcttatcgaacacgatggtgtccgcctttgccagcgcttccagatacttgccgccttttacggtgatgtgatattctccgcactcccgcatggcagaaagcaccgccagcggcatggaaagcttcagtgcacaggagaagtccaccatcaaaatggagatggcgcgggtgacattgcgggtaaaggcgtaggtagccaccgtaccggcaaggcaccacggcaccagacggtcggccagctgcaaagcccggttctcagtgccggacttgagcttttccgattcctcgatcatcgccacgatcttatcgtagcggttggtgccgccctctgccttggccacaagaacgcactcgccttcttccaccaccgtgcctgcgtagacggtggcaccggtggtcttgcgcaccggcatggactcgccggtgagggcggcctgattcaccatggcttcgccttccagcaccatgccgtccagcgggatcatgttgccggagcgcaccactacctcgtcccctgcgtgaacgcgggtcaacggtaccagcacctcgccctgcggggtgcgcacccagaccttatccacgttcagtgccatgctgcgggcaaggtcgtccaggctctttttccttgtccactcttccagcaggctgctcaccgtcagcaggaacatcaccgaccctgcggtgttgtaatctccccgcaggagggaggcggtgatgctgagcgcatccagcacctctacttccagcttgcggtgcagcaggcagcggatccccttccagataaaggcgatggagcgccacaccgtataggccgccgcgatgggcgcgggaaggaacaccttgcggaacgcccgccccgccacaagaccgaccatcttttcctgatattcctgattgatcttccggctgtcgtgggaggtgaccagcacctccagttcttcgttgtcaaagcggtaggctgccagcagggcggcggcgtccttccgactgccccggtaggtcagcaccacatctccggtgcgctcgtagacggtggctttctggatgttgtcctgcccgttcaggtaggcttccagcacatctgcccggtgcagggtcatgcgcacggcgcagacgtgcacccgcatccgccccttgccttcatgtaggatcgtacatttcattgtttttcttacccctctgcgtaaaaaagagccgcccaaagcggcggctctgctgcgctatatcactgtgcggtctgctcttcggcctgttcttcagccgtatcctcgatgacctcctgtgcagcctcggcggcgcggctctcgttgatggcctttgcatcggcaaggatgtccccggcttcctcctgcaccttattcacggtctgcatggtgcagtccttcatccgcagcaccgcagcggtggtctgggtgtagacctttttggcgtccttgctggacagcaccttgaaaccggcagagccgaacaccacaccgcccaaaaacagtgcaagcttttttgcatcaaacatatttacccctcgtttctgtatttcctatctgagcgcccgtacccttgagcagggcgggctctttatctttacattgtagcacgctttcggggtttttcaatatttttcgacgatgttaggacgcattaacattgttagcggctatgttcaagccccggcaagatgaaaagccagcggctgctcagcatccgctgaatcgtgttatatgccatctccccgcccatagaatttttgatgttgtacgcctttaaccaatcccgaaggtcggtcatggcaggcacctcctatttatacatcattgaacggtggagcagccggttcagcagcccttcccgggggcgccgtcgtccgggacgctgttgccaccggaattcaggatcgccgcgaactgctgcaactgcttgagggagcttacacccagtttttcgtagatgttcttattgtggaagcgcagggtactgtccttgatgtccagttgctccacgatctcccgggagcgcagcccggccacatagccgtcaaagatgcggcgctcggtcttggtcagggtgggaatgcccgccagaaaggtctggaatgcatcgggcaccgattcgttgcggcacacgtctgccagccgggaaagctctgtttgcatctgctggcgctccatctgcagctcgtccatccgccgccgggactcccgcttgtcctcctcgaactgccggaacgcaggcgaaaggatgtgccggtggaagtatatacagcagaacaccacgaaaaaggcgatgaacaggccgatcagcagcatttgcaggttgccggaaaacaccagccgctggtagtctgccatggggatgcagacggccagccggtaggcctggttctcgttcagacggcaaagctccgtaatgcccgcataagcgctgccggcaccgatcaattgggtcagtctgccgcccatgctgcgcagcgccagcgcgtcccggggggcgtggtagtagccatcggtagtgccgctgctaagggctgctccggcgttcaatccatcgcccgccggagcaagcaggcagatcaggcggtcaaacccggtgggctgggcaaagttctgcttgaagtagctttcgctgatctcaaagccgcacagcccgtacatcgtgccgtcctgtccccgcaggggcagcaaaaacagctgcacttcctctgaggtgccgggaatgctgaaccgctcggtcagcttataagactggtacagcggggcgctgccgggggtcatccagcggtcatagtccgggaactggtcggtctggaactccatgcgccatttgcggtggggcattacgctgtgggtcttgcccacctccgcattgccccggtacagtagcaggggcacggtgggggtgtcggcaccacttttctgcacatacagcccggcgcgggaatgctctgccccctccatgcgggtgttgacagtggcgtccagcagcacaaaggcaccggagcagctggtctgacgcaggctgcggcacagcggctcgatcatctcttcctccaacgcgttcagcacctcgggcgagtcgttcagccggtcaaaagtcatcttccgttccgcaagctgctggtctacaagggcgctcatatccgcagaaaggttcacccccatgaccgccagctgatcaaaatagcgctccacatcgttctgaaacaccgagaattggatctccagactgcgggtcgtatcctttttggtgttgtgcagactggcaaacaggaacaacgccgcaccaaaggtcagcaccagcagcaccaccagcagcaggcagggccacagcagccgggcgctcatagcgctctggcggatattctcacggtgtctggcaaaaaagtgcatcaaagtcccccttttccggctgcgctgcgggttcaggcattgtcgcacagcagctgccatgtctctgcggtcagggcctccagcgtttcgccgccggcaaggcgctgcgggtagtccttctggcgctggcgcaggctgtcatagaaggttttggtcttggcatggtaccccacgatgcccggctcggacaccggggtgttctggatgcgcatcgcattgtaaacgtcgtacagccgctgatagctctgctgctcgaacggatagtccgcaatggcgtcaaaggcggcgctggacaccggcatatacccggtatcggcggcaaattccagattgcgctgctgctcggtgagccagcgcaggaacacagcggcggcctcggccttctggtcggtggtcttaaaggcacacagacccacaccggcctgcggcatcaaaggcgtggcgttaccggcggcgtgcggcaggggtgccagcagcagatcggtgggctcggtggtgttgtccgggtaggtcacgacatcgttgtagtaaaggatggctgcagagctgccaagacccgccagcgtttcgccggtcatcacctgcgtgttggagtacagatccgaaaccagaatatcgccctgcaccagtgcccgggcaaattccatccacgaagcgcggaagacctcgttggtcaggtcgtaccagctgtccttgtacagcgcgccgctgccctgttccagcgcgttcagctccaccagacgcagcggatagtccagcgcgcagaagggcttgccctgcgaccattgccggtaggcacccgccatttcaaaaaagccgtcccatgtggcaagggtggaaagctgtgccctggtatccgccgcaaaccgggcgtactgggagccgtttaaaaagacgagctgggtggatttggacaccgggaacaccacctgccgcccctcgatgatgccgtcctgcacaaagccgggcacataggccgccatttcctcggcggtaaaccagtcgttccagtccacaagggtctcgatgcccagcgctttggcatccgaggagtgcgccgagaacaggtccggcaggtccagcgcgccgggcttgccggccttggcatcctgcagctggccgccgatggcggcgctgttggtcatgttggtcacgttgagcaggatgcccttctctctgcccaccgtgtcgttgaactcggtcagcaggcggttcatgggcgagtcggcctgttcgccgtacacatgccagatgctgagcatggtggggtccttgggcgagagcagggtcttgctgccgctgcagcccgcaagagccagaccggggacgagcgccgcaagctttaaaaatgtccttcgttccatcttcgtaactcctttccgcaatacgccaaacaagggggaagacccggcaaaagaagcgccgcagcggcctgctttggcggaagaccgcccccaaatccccccaattttgggctttttggggggattccttacggggacggcccgagagccccaaaatttatttttaaatctccccccaaaaacggcttttctgggggggcaattttttccgcagtatgatacagtacaaacagaagatctcctgcaccagatgcagacatcccgtcgttatgcacaaagcgtcccaacagatgcagcgtgattctatccataaggatagcacaagatgcgtcagtctgcaagtgcagagtaccccccaacccaaaatccccccaaagaaaacagggggacaagacagaaaggagcacccctatgaaagagatgaacagacgcgcattcctcgccctctccggcgcatcggtcgccatgctggcactggctgcctgcggcggtgcacccaccacgccgcccgcagtacccacgaacggcgaagaagccaaggtgctgcaagccatcaacaaataccgcgcagcagccggggtgaaggaacagatcgcactggataacggtctgaagcccgcaactgaaattgtggtgaagattgcaaagggcgaaatgaaatatgacgaaaaagccgcggaagcgcttggtaaggcaatagccggctatgatgtaccgggcggaccgatcggcatagcttttgataaggatacaggtaatatgatgccggtatgtgtatactcggaggatgcagagaagatggcacaaaatcttccgcttcaggtggacgagagcgctaaggaaaatctgaaatcagccagtctgattacgattcagttgttcgagtatggcggtgtgaaatactgggtcgcagtagccgccgaaggcaaaaagtaactccctgatcacagccattcccatttatcccctgtttgccccgggcacactccccctgtgtccggggctttataagaagaaaggagcacccccatgaaagagatgaaccgacgcagcgcccggtgggcccttggcgtatgggcgctggtgctggctgcggtcctgctgctggcggggtgcggcggtgcatcggacgccgctgctcccgcaggccccagcgccgctgccgaccaaagctccgacaatagccggagcacccccggcgcggtggcgcaggccgtccagaaggagcgcatcactgaccagtacacgctggaaaagaacgtttcgggcgtgtggggagaggaagcggtgcagtacatttccgtccatgtgcccaagctggaatgcgacagcccggacgccgtaagcctgaacaaagagcttgccgccatctatgcggcggatttccgggaatatgagaactacgaggaggccgggcaaccggggagcgaagccccgctgatcggtgtgggctgggatgactggtggtacggcgactgcgtcagcctggtggtgcgcagccgctacggcggcaccgccccgtggcgttacagcggctggtgcttcgattttgccagcggccgacagctcaccgtggctgaaatgcttcagcgcatggggctggacccggacaccgtgcaggagcaggtgcagcgacaggtcatgcaggcctttgaccgggaaatggcgctgggcgcgtattacgagggcctgcgcagcggcggagagctttcgcaaatgcgaatggacacgctggaatacaatgagctggaaaacctgtgcctgcttttgccgcagcaggatcagctggtgctccgtggaaagtacagctgtgaagaaggctggcagcagctggatgtggagatcccgctgacctccgccgcccccgccgacaccccgctgctgaccgatgcctacgacggggtgcaggtgcagctggagggaacgcaggccaccatcaccctccgccccgcacccaagaccgagcagtggggcacagacctcaacgtctgggtggagcaggagcgcacctaccccatccttggctcttataatgagtatatcgacgtgtgcatcggggagcaggaggatggcttcttccgcccggtggtctatctgctgaccaaagacggcgtggtggagtatgtggacgtgttgcgctgcctcatgttcggcaacgccatgatctgtcaggaccccatctactttgccaacaacggcactgcgctggaacgcagcggcagcgaggtgaacctgcgccgggcggatggctctgtgctggagctggcgcccctgtcggcagagtggagcgcgcaggaaattccctattccgtcaccggctcctacaactacacctctgaaaccggctggaactggatggatctgggcagcgacggcagcgcccagctgggcgtgcaggacaacagccgcatctatcggggcgatgccgcgtatctgggcgttgtgcccgagggcgtggtactgggcatcgctgccgataaggagctcggatttgtggcggcgttcaagaacgacctgtacaacgagaacctgaccatgaccatgatcgccgggcaaaacccctttgccgagggcgagacccagctgcaaatgacccgcagctacggctgagaacacaggagaacgaccatgaaatacaaacgccttaccgctgcggtgctggcggcggcactctggctgaccggctgcggcggcgcgacggctcccgctgcccccgcaggctccggcgcagcttcccaaagcaccgcagacacggcggtgcagacgtcgcaaaaagaccgcatcaccgagcagttcacgctggaaaagaccgtccgggacgagtacggcatcacccagaatctgactgtccatgtgccgcagcttatgtgcgacagcccggacgccgcctatctcaacgatgagcttgccgccatgtatgcggcagacttccggcagtatgaggacagcccggacgccgagctccaacaggacgaatggtgcccgcagatctacatcaactgggacgcctactggtacggcgactgcgtaagtcttgtgatgttccgctacgacggcggctccgacccgggatattcccggggctggtgcttcgattttgccaccgaaaagcaggtctccgtgacggaaatgctgcagcgcatggggctggacccggacgccgtgcagcagcagatgctgcgcgaggccatgcagacctttgaccggcacatagcgcagggcggctactacgagggcctgcgcagcggcggcaatctggcaagtatgcggctgaacacgctggaaaacaaccagctggatgacctgtgcctgctgctgccggaacaggaccggctggtgctccggggcgggtgcagctccaccgccgggtggggctggcggcagctggatgtagaaatcccgctgcaggctgctgacccgcagccgcagacggtgctgaccgatacctacggcagcgcttcagtgcagctggaaggaacgcagggcgccatcaccctccgccgcacgccggagaccgccgcatgggacacggattacggcatccggctggaacaggaccgcacctaccccatccttggcatctataatgagtatatcgacgtgtgcatcggagaactcggcgcatccttccacccggtggtctatctgctgaccaaggacggcgtggtggaatatgtggatgtgctgcactgccttatgttcggcagcgctctggtctgtcaggaccctatctatattgcaaatcagggcgtggcgctggaacgcagcggcaaagaggtaattctgcgtcaggaggatggctctgtgctggaactggctcccctgacggcagagtggaacgagctggaactcccctctgaggtcaccggtgccttcaacgacatggccaacaaccaatttgactggatggacgtggaaagcggcggttatttccagatgggtgttcaggacaacaacgttttctatcagggctacgccgactatctgggcgtggtaccggaaggcatggtgctgggcatttttaccaacgagaccccggatgggatacccggcatcacctttgtggcggcgatgaagtacgacctgcacaccaacaccctgtcccttaccatgatcggcggccccaacccctttgaagagggcgcgacacagctgcaaatgatccgctgcccggatacatggccccagcgggtaccgctgacagccgactgaccccggtacgaccaccgagaatacaggagaaccaccatgaaacacaaagcattccgctggataccggcagctttgctggccgcggcgctgctggcaggctgcggggcagagactgccaccccggcaagcgccgccgccccggcctctgtctccgccgctgcttccaccccggaagacagcccggcacaaaaaaagcccggggcagacgggcggcgcaccgaacagactgtggcagaacctccagccctgccggaagactgggagcagcaggtgctggccgagtggatggcagtcacggcggtgacgcagggtgaaagctatacccccgccgaccgcaacgaaagctttaccctgcggctggaaaaggccgagatcaccggcacggtgaccgtctccttcatccgggaaacatacgtcagcccgcagatccagtccgctgccgagacccgcgccggagagctgaatgccggcgctgtgaccggctgggacggggaaaaaagtcagggctggaatctaaaatgtctcaacgaggacggcagaagccgctggattatctccatgatggaggacggctcgctgcggatgcagtccaccggccccaaaaagggcagtgaggtctggtacgtttttcagcgcaccgaggcgtgggacgacatcggctacaccgccatcccccgcaggctgtggggcacttaccgcgccggagacgagaccgcaaaaggcatccgctggatgacctttttgccggacggcagctgctgtatgagcgtggaatgggacgggtggaacggcaccctgaccggcaccgccgagggaacacagggccgcaccgaggacggtaccgagctgtacttcacgctgaccgaccagaacggcagaccctgcgagttctgggccattttgctgaacgatgacggcagccccagcggctgcagcctgaaataccgcgccggagaagtgctgtttgaccgggacacgcgtcccgtttactggaaaaacgactccccggatctaacccttgtaccgtgaccgaaaccgggaaccgtgcgataacagaaagttatcgcttacacaaataaaacatacaggaggaaattactatgggtcttatcaaagcaggtatgggcgcactgggcggaactctcgcagaccagtggaaggaatttttctactgcgattctctggacaaagatgtgctgatggtcaagggccagaagcgcacctcccgccgcagctccaacaacggcgaggacaacatcatcaccaacggcagcggcatcgccgtggcagacggacagtgcatgctcattgtggagcagggccgggtggtggaggtgtgcgccgaaccgggcgaattcacctttgacgcatccaccgagcccagcgtgttcaccggcaacttcggcgacagtctggcagctaccttccagaccgtagccaagcgctttacctacggcggcgacaccggcaaggaccagcgggtgtactacatcaacaccaaggaactgggcgagatcctgtacggcaccgccacccccatccccttccgagtggtggtcagcgaggagcggggctacaagctctcggtgaacctgcggtgcaacggcagcttcacctgccgcatctgcgacccgctgctgttctacaccaacgtgtgcagcaacgtctccacccagtatgacgcatccgagatcgctccccgcctgaagagtgagttgctgaacgctttgcagcccgcgctggctactctttctgccaacaaggtgcagtattacgagatccccgcccacacgctggagatctcggacgccctcaacgagcagctgtccaatgtctggcgcaaaaagcgcggtattgaagtgttctccttcaacatcaactccctgtccatcccggaggagcagcagaagaagatcaccgaatgggaagaaaacgccatgaccaccgaccccaccaccgccgcagctcgtctggtgggtggccagatcgacgccatgaagaccgccgccggcaacaccgccggtgccatgaccggctttatgggcatgggcatggcagccggtgcaggcggtatgggcggcatgagcgcccagaacctgttcgctatgggccagcaggcccgtccggacagcgtggacgcgccccagcaggtcagccgccccgcacccgccccggcagacagctggaagtgcagctgcggcgctaccgttaccggcaaattctgcccggaatgtggcagcaaaaagccggagccgaagcccgctgcggacagctggacctgcagctgtggtgctaccgttacgggcaagttctgcccggagtgcggcaagccccgcccggcggcagcagaaggctggacttgcagctgcggcgcggtgaacaaaggcaagttctgctccgagtgcggcaaacccaagcccgccggtacgcccaaatataagtgcgacaaatgcggctgggagccggcagaccccgcacatccgcccaagttctgcccggagtgcggcgacccctttgacgacagcgacctgacttgacaaatacagagcaatgaaaggagcataccatgatgggattcttttccaacctgttcgcaaaacagaactgtgccgtctgcggtaaggagtgcggcaccctgcaccgctccaagctccgggatggacagttcctctgtgacgactgcggcaacaagtgctccaaatatatccggctcagcgagctgacgctggacgaggccaaggagcacatggagtatatggcccggatgaagcgggtgttcgacgaggtgttcaacaaaaccgagttccgggtcaacgcatacccctccaccccatcgcaaatggggctggtgttctgcgatgagcttggaatgctgtacatcgacgaccgcaccggcggacggggcaagatgccggagctgatccgctacgaccagatcgccagctatgaggagtatctggacgagacccccgccaaggagccgggccaggaacccaccctcaacggcggcggcctgaagctgaagctggtgcagccccgcagcatcaccgaggcccagacccagcggggtatgcgtccccacccctacatcaagcaggagctggtcatctgcttcagcaagcgggaccggcgggagatcggctatgcccacatcgcacggcagcatctggatcacatcttcggagtccacgacaacgagacgagcctgttcggccgccggatgtccaaggccgaggaacgggagctgaagggccagatgggcatgatcggtgccatgggtgccgtggcatctgccgccatgaagggcgggcagctctctgagcaggaaaaggcccgctttgtggagaacatcaatctggcaaacgacgcccagaccggcggcatggcattgtacagccgccgtgctgacgaagcctttgcaaaggtgtagtgactgaaaaaggaggaacggatatgagaaagatccagcgcagagatttcctcaaggccatgggccttgccaccgccgccctcgggctgaccgcctgcggcggctccggtgccgccagcgcttccagcgtttccagtgcaccggcttccagcagcagtgccccgtccgcttcggcacagccggaatcagcagtggacaaagccgcccctgcaggggcccctgtgacccagttccagaccggggagctgaccatcggcgaatacaccttcaaggcgcagtacatcccctttgacgtccgccgggaactggacggagcgcatcactgcatccatgcggacagctaccggggcaattacttcttcagcttctacaacgaggacgatgaagagcagtctgccaagatcttcgagtatgccatcaaggacgaccggctgaccccggtggcagagtacaacattgacggaagcaacgccctcagcatcgaccgcaatggcatcctgtacgccatggatccctttgatgtctactgctacgatctgaacagcagcgacccggaagagcccggcgacgcactggactacatgggcagctgctattcctccaaggatcgggatctgactgtaatctactggaccaactccgcgccggtgctggtgcaggacggcgagtacaccgagctgacgctggagggcgataacgagatcggccccttctgcagtatgccctccctgaacctcagcggagacgaactgctgacggtgggcgagccggactccagcggagactactactttgccgcctttgatctggacggcaatgagctggcccgcagctcgcagccggtgggcagctttgacgccgtgatgatgaagcgccccaacggctatctgctggacacgggctatatgtgggagctgtacgcgccggacggcacttttttggaaaagtcccttcccgtgggtgagcgcgagaccctgtgccagctgtgcggcgacttctgcacctttgatgttttcctgccgctggaagaaaacactttcttggcagtgggccaccacggcaaagccaccgagccggacgagccggtggtgttccgcatcactacggatttctgagccgaccgctttggcgggaagactgacgcaaaaacagcggggccggggaaaagccctcggccccctttggaacaacaggaggaaacgctatggcaggaatgctggaatacaagtgcccctgctgcgatggcgccatccaatttgacagcgccacccagaagatgaaatgcccttactgtgacaccgagttcgacgtggataccctcaagggctacgacgaggagctgaaggacgaaaagcccagcgagatggagtggaccacccccggcggcagctgggcagaaggggagaccgccggtctgcatacttacagctgcaagagctgcggcggcgagatcgtgggcgacgacaccatggccgcctcggcctgccccttctgcggcaatcccatcgtcctcaccggacagtttgccggggccctgcggcccgacctcatcatccccttcaagctggacaaaaaggccgccaaggccaaattgcaggagcatctcaagggcaagaccctgctgccccgggtgttccgcagccagaaccacatcgacgagatcaagggcgtgtatgtgcccttctggctctttgacagcgatgccgacgctcagctgcggttcactgctacccggacccgctgctggtcggacagcaaatacgactataccgagaccaactactactccgtccggcgggacggcactttgggctttgacgcggtgccggtggacggctcctccaagatcgaggacgacctgatggagtccatcgagccctttgccatgcaggacgccatccccttccagaccgcctatctggcgggctatgtggcggataaatacgatgtgagcgcagaggacagcatcgagcgggccaacaaacgcatccgccgctccactgaggagacgttccagcagaccgttaccggctacgattcggtcaaggtggataacagcagcatccagctgcacggcggcaaggcaaagtatgcgctgttcccggtctggctgctgagcaccagctggcggggtgaaaactatctgtttgccatgaatggtcagaccggcaaattcgtgggtgacctgcccgtggacaagggcgctgcccgcaagtggatgctgggccttacggctgccctttccgccgcgtcctacggcgtgatgtggctgctgtggctggcacggatcctgtaaaggagggacgaacgatgaaaaagacttccaaccgactgcactccctctttgcggcgctggcagcactgattcttgcggcggcgctggcagttccggcctttgcggtgaagggcggctttgccgacctgtactaccgcatgttcgacgacgctgaggtgctgaccgaggacgaggacaacgagctggaggacgcactggaagagctgagcctgcgccagagcttcgatgtgaccattgccaccatcgagtcgatggaaagcgttggtgccgacagcatggagcagtttgccgatgatctgtatgactactgccagtacggctacggccccgatatggacggcgtgctgctgctggtgagcgtgggcgaccgcaaatggcacatctccacctgcggctacggcatcaccgcctttacggatgccggcatccagtaccttggcgagcagatgacccccttcatggccgatggagactacgccggtgccttccgcacctttgtccaatggtcggatacctacattgacgctgcccgggcgggccacccctatgacgtgaataacctgccccgggagccgctgtctctcatgtacctgttccttgcgctgggcatcggccttgtgctggcatgggtcgtcgtccatgtgatgaaaagccagctgcgcagcgtggcgttccaggagaatgccgccagctatgtgcgggagggcagcatgaatctgaccaacagccgggagctgttcctgtaccgtgacgtgcaccgcaccgagcgaccgaaggagtcccgctccagcgattccggcggcagctccacccacacctcttccagcggcaccacccacggcggtggaggcggctcgttctgaaaggagtatgtttatgaacccttatctttcggaaaaagcccggggtgagatcccccgtgtcctcaaatggctgcggaacgcggggcttgccttctgcgtgttctgctcttttggcgggttgtataccctctgtctggacctgcaggctaaggacacctcccaccttgtcgggtatgtgttctggatcgtggtgggggccgtgccccttgttctgttcgcacgcaacgaaaaacgccgctaccatgcaagaaccatcgcccgcagggtggagagctactccgggccggaggtgcctctgcggtggctgtgcaacagcgttggcatggacactaaagaccttgcatggtattttgaaaacggctattttgcaaacctcagtctggatctgaaccagaagatcgttcgtaggcggactgtgccccgccatgacccgaaccggagctgaaccctttacagctgaaacagaaaggagtattttcatgggactttttgataagatgaagcaggccgccgcaaatgtttccggcaaccagaccgtcacctttacctttcaggctctgccggaaagccttgcccagatgcaggcactgccggaggccagtctggacaccccctttaagaccgcagccctcaccgtctgcgcactgtgcgcctacggtgccgataaaaacatcgggctggagatgctcaactggctgcggggcccccgcccgctgaacgggcaggagatctccttcctgaacgaccgctttcgggatggcaagagctatatcccgttctcctactttgtgggtgcgtcgccggaaaacggctataccccccgccagcccttcaccctgctggtgggcagcaaccacacctccaacaccgaggagggctactgcaagctgttcatcccctgcggcggtgccgatgccccccgccccatcaagctgcgccgcaagggcgacgggcagtggttcttgtgggagcaatacctgatgaccggcatccgcatcccggcgtctgccgacccgtgggcataaaacaaaggggctgacatgaaagccatgaaaacttttgcagcactgcttgcactggctttcagtctggcagggtgcggtgcggtggacggcgaccccgtccgccccgcccccggcagcgccgggcagggcagcagcacagtggcttccggtgccgattccgctgagccggagcagcttgccgcgctgcggcagctggcaggggaaaacggagaccttgccggggtgctctatctgggcagcgttccggagcgcaccaccgatgtgcacgccgtgctggacagcttaccggaacagtcgtggcagtttgttgcggacatcccggcagaccgctgggtcgcagcgccgggcggcgggcgggagctgtactgcatctttgccgtgcgcagggaggatacgctttttgtctatgaaaaacaggaccccgcgtatcccgcgcagctggggaaagaactttacggcaggcagggtggccagcccattctgctgctgtgcaacggcagcagggaggacaccgacaccatggtaacggtctattgcagcaccggacgcccgctggactggaacccgcagctttccgccgagaccagccgccctgtgccggtggagggcgtagacgatttttcccaacacccaacgcccggcgctgccccctgaggtgcgccccggcagggcatgagaaaggagaacctatgaaaaagatcaaacttttggcagccctgctggcgctgaccatcggccttgcaggctgcggcgggtcgtccaagggcggcagcagacccgccagctcagcgtccaaaaataagctggacggcgacaatatgaccgcacccagcacccaagagcaggaatacgaagagccggaggatgtggcctatatgcgccttctggcaggggaggacgaataccgcgcctgtgtgctgtatctgggcggctcctatgaggtgaccaccgatgtgcagaaggtgctggacagccagccggacttacgccagctgtggggcttcgtctatgacatcccgcaggatcactgggtcgtggcaccggatggcgggtgcgacctgtactgcatcttcccgcaggaggcgcaggccaccctgttcgtctacgagacgagcctgacagacgatgccgaaaacccgctccagcgcggtaaacagctctattacagtgaggacggtcagcccatcctgctgctgtgcaacatcagcgatatcgcccccaacaccgaggtggagctgtaccccaccgccggcgaagagctggtgttcagccccttcctttccggcgagaacggccatgtggtggaagcagacggcgtgtgtgattttaccatctacccggagggggacgactgggagaccgacaccagcccatggtcgctggagggcaactggctggagaccggccgcgacaccgacgagggctattctgacaccaaccccgcagacgccgaccggatgtgctttttgcccaccgacgccgacaccgagggcagccaactgcccttcaccgccagctacatcaccccctacccggagctgaacgtggaggaagccgacctgttctatcaggagggcaccccggaggtacccttccgctccaatcaggagtggtacgccacctttaccgggacccacggcgaccgctacgctatcacgctggaggacgaggacacccttgccctgaagttctatatggagggcgaagagagctacatgagtcttgtcagcaccgtctactttgcgcggcaggaagccatgggctgaccggcgcgcgacccgacaccgggaggaatgcaccatgaaacacaccaaaaagatcaccatcctccactccaatgatctgcacggagattttctggcagagcaggtggacgaaaaactggtgggcggcgtttccatgctgtccggctacattgaaaaggtgcgggcagaacagcccaacaccatctacgccattgcaggcgatatgttccgtggctcggtcattgattccgaatacaaggggctttccaccatcgagatcatgaacgcccttgccccggacgtggtcaccataggcaaccacgaggtggattacggcatcgcgcatctgctgttcatcgaaaaatgcgcccggttccccattatcaacgcaaacctctatatcaagaacacccccacccggctgttcaccccctacaagatcctgcagatggacggcatgaacatcctgttcatcggtatcatcacgcaggacgtgatcaaccagaccaaatccgaatcgctggtaggctcctttgtagataccgccgccgctgccgccgaggtgggcaagatctgcaacgcccacaacagcatcgatattgattttaccgtgctgctgacccacatcggatttgaggaggaccgccatctggcgcgccagctggacccggcgtggggagtggatctgatcatcggcgggcacagccacaccctgccggagcacgcggtggaggaaaacggcgtggtcattgcgcaggcgggcaccggcaccgaccagatcgggcgctttgacatcatcgtggacacggacaacaactgtatcgattcctacacatggcgcaccgtgcctatctgcgccgagacctgcccccgcaaccccaccatggagcaggtgctgcaccgcttcaccagtcaggtggacgaaaagtacagccacatcgtagggcgcttccgccgggagctcacccacccccagcgcacgcaggagaccgaactgggcaacctgtttgcggatatcttcacccgcagccttggcatcgacgtgatgctcatcggctccggcagcatccgggccgaaaagctgggccccatcgttacctacggcgaccttatcgagggcttcccctacgatgacggcgtattcatgttcaaggtgaccggccagcagctgcgggaaatgctccactatatgctgcgggaggaggcctacaccgggcacaccgagttctaccagctgccctctaccctgcgcctgcgatacgaccgccgcaagggcgactttgattactttacctactgcggcagagaggtgggcaaggagatcggcgatgacgccctgttcaccgtgggcttgcagaactaccactttaaaaacatcgaaagctttttcaacatctcctacgacaccctctgcaagatccagaagccccgcagcgtggcaacctcctgtcaggatatcctgatggagtatttccgggagcacgagatgctggacgcggtggtggacggccggatgaccattctgccccccacggcaagggaaggagactgacccatgcgcacagaaaggaggagacgacccatgcgcaccttctcgctggtgctgctggggctggcggtaggggcggcactgctcagccgcagccccagcagcaccgccccaacgcccccggagcctgcggcttccgccccggcgctggccgaccttgaaacgctggagttctgggagcggggcagctatatccagcccatctcccgcacctgtctcacccgcacctccgagggcacccgggtagagctggagctgtaccacgaagaagtgtatcaggagcaggccgggccggaacttctggaacaggccaaggccattctggaagagtacggcgtgggcggctgggcaggcttctccggccacgaccccaacgtgctggacggcagcagcttccggctggaagccactcttgccgacggcacccgcattgaagcccacggggaaaacaggtttcccccaaactaccgggacgtgatgagcgctctggacgccctcaccgccgccgctcagaaaaacgccctgcagcaatacaccccataacagaaaggagcacaccatgaaacaacgattctcaaaacgaacgcgccttgtcagtgcccttttgacgctggccatggtattcaccatcctgcccttcagcgcctttgcggcgaacacagaaattgattttaattcgccggattttaagcttaatttcccggatgaggaatttcggcgctttctcaaagaatgctgtgacaaaaacggcgatggcaagctcgatgtggatatcaagaatatgacgattccaaccagttatgcaatcaaaagtcttgaaggaattcgtttctttgaagatctcgaaaagctggattgccacggtattggcttgacagaacttaatgttagcagaaatttcaacctgaaggagctggattgttccgggaatcaactgaaagattatcttcctattctttcaagcggactgaaaaaactgaattgctccaataataaactgacccacatgaatctgggcattcgctctgggctgaatcttgaagaggtggattgctccaataacaatataacgaatatcgtaatggatagcgtgggggaactggtcaaatttgattgttccaacaacgacctgatgacgttggatgtcagccaatgcttcaagctggaagaactgaattgctctggaaatcaattgatggagttggatgtcagcaaccagacgcagctgacacagctggattgtagcaaaaataaattgacggaactgaacgtgaaacagaatgacggcttgatatctttgatgtgcaatgataatcagctgaaaacgctggacctgagccaaaatcacagtttgagtaatctgaattgtgcaaggaatcggttggcttgtgtagacgttactggaatcagcggtacgataatggctgatggcaacaggcgtcccattgctgtccgtacagacggaaagtttgacttgaccaccctgcccggctttgacgtgagcaaggcaaccttctggaacggcggcattgtttccggcacaactctaagtgtgaatgcgggcgtagacgaggtgagctaccaatacaattgcggcaatggagtaaaccccacattcatctttgaaaccagtctgcccatcaatgaggataatttccccaacgataactttagaaattacatcaaaacctatatagcaggtggcagcgatgtcctcacggtggaacaacaaagaaatgtcacgaaaatcgaagtcgaaggacggaacatcagcaacttaaaaggtattgaggcgttccccaacctgaaagagttgaattgcggaaacaattctatccagaaattagacctgagacagaatccagagttggaaaaattgatatgcaataagaatcaactgacccagctggacctgagcaagaatctcaaaatttaccatctgaagtgttccgagaaccagttggaacagctggatgtatcgaatctgaaagatttggtgacgctcgattgcttgcacaacaatctggagcaactggatgtcaaaaatagtaaatttctggtagcactcaactgttctgcaaatcagttgacagagctggacttagatgtgactcataaacccaaactggaaagggtagaatgccaaagcaaccagctgacatcgctgattctgggcgagaataaactgctgaagaaactgaattgtgccatcaaccagttgacccagctgaatttgaacaatatgatttccttgaaggagctgaagtgccaaaacaaccagctgaccgcgttggacgtcagcagcagtccagacttgactacattggtgcttaagaataaccatctcaccagcctgaatctggatagcaatccgcatctcgatttcacttatacggatgtttaccattccgattttaataatgtttacaccgttaccctgaaccctgaccgtacgtttaacctgaacactctgcccgggggctttgatataaaccgggttacaggatgggtgcatggcaaagccaacgggaacattctgacagtcgatgaaggcacaaacgtagtgtactatggttatcagtgcataactggtggtatgatggatgcaagtttcacactggatgtgactggcaccggcggctccacaggtggtggttctactggcggcggcacagttcccccggtaacacctccttccggcggtgatagcaccggcacaacgacacctccttctggcggcggcactggtacaacgacacctccttctggcggcggcaccggtacaacgacacctccttccggcggtgatggcaccggtacaacgacacctccttccggcggtgacggtggcggcggtgcggtcatcattatggcggctggtgcagtggcggctggcgttgtaggctacggcgtgtacaattatgtttccggccgcaagctgcaagccctgctgccggaaggcgtggctgcacccgagaaccgcgcccagaccgcgctgctgctgtggaacaccgcaggccgtcccgagcctgccgaagccccggcctttgcagacgtggcagacccggataccgccaaggcagcccagtggtgcgtggagcaggggctgatgaaacgccgcctgaacggcaaatttgccccgggcagcagcatcccggcctatcaggtactgaacgcctaccgcaagctggcaggctaaaaccgcgctgctcagcagttcttctataacagtttgcgtttttactgcacaagcaacatccgcaaactgtatatcgcagctatgctgttttgataggtgctgtttttgaaaattgcaataatggccaaaaatacagtatcctgttactgctggcagcagaaggatttaccgcagacagaagatgcgttttgtactgattcacataccgagttttcctatggcaggcggaccaggctcatcatgcaaacaacgaaaaacaggaagttcccgctagcagagttcccataaaacagtatttgcaaaaattcccacaatgggggaagatttggcgtgacttcggtcacgccttttcttttgcttccagttcatccagagggatataccccagcccatcgtacttgatatggatgtgctgcacccgctttccgctggacttatccggggcatctacatagatggccgacaccagttcacggagagcataaggggtgagttcttcaatatgaacgtatttgtgcgctttctggacgaacttctcaatattctcgatctgctgttcctgtacttcaatttcctgctggatagagagggcttcctcttccagatgcttctgttcggcatcgtagctctggctcatcatgtcaaagcgttcatcgctcagctttccgctggcgttatcctcgtagattttcatgaacagccgtttgaggtctgcaatccgcttctcattccgggcaagctgcttcttcaggacggtcagcttttcggtgctttccacccgaagctgctcctccatgaccttgcggaagtagtcttcatgacggagaatgtagtccgtcacccgctgaacatgactcagtacacgtccttccagaacctttacccggatgaagtgtcccttgcacttgctcccgttcttcttgtgcagagagcaatcaaagaagtcttgactgaagtccctgttgttggacgaaccatattgcatcttggaaccgcagtcagcgcagtagaccataccggagaaaatgctgctcttgcctgtccgggtcatgcggtgacgctggttacgaatctcctgaaccttttcaaacacatcatcgtcaataatgcgctcatgtgtatccgggaagatagcctgattttccacaggattcaaatgtctctttttatcccagatagagttagtataggtcttgaagttgactgtgcagccagtgtactcccggcgttccagaatcaaacttactgctcttttatcccagcggtaagggtcttccggggcaggtgcgtttgtactccggccatggctcagcttgtaggcggtgggagtcagaacattgtccacccacagttggtttgcaatttgggtcgggccacgtccctccatgcacatggagaagatgcgcttcacaatcgcagccgcttccgggtcaacaagccaatgcttcgggttctccgggtcttttacatagccgtacggaacattgaccgtcagcggcactccacgctctcccttggccttctggacagcccgaatcttgcggctggtatcgcgggcgtaaaactcgttgaaccagttcttaatacccgcaaaatcgttgtttacgctgttcgggtcaatggtgtcgtaattgtcgttaatggcaatgtagcgaacgctatactggggaaaggtaaagtttgtgtacagacccgtcaaggcagagttgcgccccagtcgggacaggtctttcgtgataacgattcctacatgccctgcttcgatctcgaccagcatactctgaaagccggggcggtcatagttcgtgccggagtagccatcatccacaaagaacactgggttcgggaagtggttctttttggcgtattccagaaggatagccttctggttctcaatggacaggctttcgccgagccgtgcgtcctcttgcgacagtcggcagtaaagtgcggtgatcttattcgttgctccagacattgttgtgtcctccttactctgtggagcaactgtcagtacaggattggttaacgggtcaagtatagcagaattaggcgcagttgtcattcgtctgcaccctcatcttcaaatttttgctgggcgttcttggcaacaatgcgctccagcttcttcaaaaaggattccttgccctcatagctgccggtcacggtgtaggtggtgtgaccgactttctccgtggtggtcagttctggaatccagaaagcggacagattcttgacatggaggttgccgttctcatctacataggagccgtgcttcttctgctcttcggtcaagggctgccgcttgaaatagatttcattttcggagatgctcacggtttcgctggcctgctccttcggggtatcgtcatacagctgggcgaaaaatgccagtgcatcttcgggtgagtcttcctccatgagctgctcgaaaatctgctgttcctctgccgagaggttattccatgcggcttccaactcctgctcgttggctgcgttgacaaaggcttcgatctcttttttcatggtgcatcctcctttggctgcgaaaagcgttttttcaaaaagtatgggttttcgtgagagcaagaatcgtcccgtggccacaaattttcaattcttgaaaatttcctgcccctttgggacagcttcttgttggggcgtgcctgccccaaaccctgccagataaaagcaaaggggcattatctgccccgatgcttttcctttcgcttctgctgtttcagttcaaattgacgctgcttttctgcttcgcgttgtttacggctaagtgcttttcgcaccagcttgttttcttctcgctgcatttgcaacgcctgctgtgattttgtgccgattcctgtggcagctgtttcctttcggatttgccgttgcaatcgctttggattcacagactctttctttacaactgtctcaacagatggactgaagcgcagccgactgtaattcttgagcagatactccaagacttcatagtcctttggttctgcgccaaacacgactttacacactgaaagctttcttctctcaatacgctcaaacactccaatccagaatggagcctcaaaaaacacagtcagctttgtagaatcaatgtccataacgaaaccctcctgaaataaatccttacaggaatggacaacccggaggggaaggttacttacctacaccgtgcggtgcagacggctgggctacctaccagctctagcatctctcaggaagaaatgcgttgcgtttttatcctgcttttattatataaagcacatccctgtgcattatatctaccttaattggttttccaagtgaagtataccacactcgtggtcaaatgaccacccatatatacgagaatttgaccgttttactgcgtacgtgcgtaccaaccttccgtacgcatgtacgcagcgattcgcccgaaacgaaccccataccaccgttccccctcggagagcccactacactttgcagacagcagggctgaaagtgtcatagtgggttattacacttccgcagaagtgccttttcctcgccgcaaacagccggggtgcgcctttgtgagagccttttgtgtggcgaatccacatcgcccacaggcgatgtgagcagggattccaagggggcgcagcaccccttggcacacggactttggtacaaagtctagtgtgttacacctttccagaggtgtacacgttcctgaaatgcaaaaagccccatacccaacaccttgacggtgcggacatgggacttgatgcttcctcggcctagcctggtactcgtaaccaatcctgacatgcagttgccgtgtcatttctcgaaaactgttttacgaatacccagcactggggaactccctgttgtacatatcgctatcgtccgtggctttaatcgcaagttttacaagcagagcaaatctcaacaacctgtttgcgatatgcaattcacggttgttgccaacgaatcaaatcgtgaattgcgatggcagggtgcgtccgggtggacgcaccctgtttttctactatgcttcatcattttctgcgcgcagcatccggtatccgacaccaacatgggtctggatcagatgcggcgcatccgggcatcgttccaattttttgcgcagggatgccatgtaaacgcgcaaggaagcaatgtcattttcctgcgtactgccccatactttctgcgtgagggaggtatgcgtcagcactttgcccacattatgcgccagcacacacagcagtttgtactcgatgggggtcaaatgcaattcattctcgctcagccagacgcagcctgccgagaagtcgatcttcaaaggaccattgacaaaaaccggactgtttatgccgtcagacgccagcagattcaatcggcgctgcgttacacgcagtcttgccagcagctcatccacggaaaacggctttgtcagataatcgtctgcgccgttgtccagtgcctcgatcttatcagaatcttcgctccgggcactcaggacgatgatgggcaggttcgaccatgtgcggacgctgcggatgacctcgatgccgtctatatcgggcagcccaagatccagcagcatgatgtccggattgtggctggtcgtcatcatgatcgccgtttccccattggaagcagtcagatatttatagccgtgggttttcagggtcgttgtgatcagacaccgtacaggaacatcatcctctacgaccagaatggacggcttattcatgaatgttcacctcgctttgcggcaatgcaaaggaaaagacactgccatttggaatgttgtcacgcagggtcaatgttccgccgtgagccgtcaggatcgcacggcagaggggcaaacccagtccaaggctgcggtggctgtctgcaatgcggctctgcccggtataaaacatctcgaacacctgtgcttttgcgcgatccggaatgccggggccgttatctgcaacttccactacgacctgatggtctttccggtaagccgagatctgaatgaccgagcccacgggggtgtatttgatggcgttatccaccagattgacaacgacctgcatgatcagccgtgcatccacattgaccaggaggatctcgtccccatactgtgttgtgatggtgtgttcgcagcttttccggttgacatgatgcagtgcttcttcgatcatttcgtccatcagctgcggtgagatctgcagattcatccgcccatcctcaatgcgggtgatggaaagcagattttccaccagaccgatcagccattgtgcatcgtcaaaaatatcggtgcagatcttgttccgggtctctgtatccagcgtttctccgttggaaagcagattgctggcattgccggaaatggaggtcagcggggtgcgcaggtcatgggagatcgtgcgcagcaggtttgcccgcagttcttcattccttgcctgcaatgcagcttgctctttttccagcgcgtttctgcggttttcgatggccagcgcaccttcgcccagaatggaaagcaacacactgttttcaaaggcatccagcggtttttcggacagatcgatcccgatcactccaaacacgccgcctccggtccgaagcgcaagataaagcccctttgcgtccgggtagctatccgtgcctgcgccggaacgctttttgttggcaaacgtccagtttgccgcatcccgttcttccggtgcagaaaagatgttgcgcggcacttccccatccatctcaaaaacctgttctgacccaagatctccgttttgttccgggtaaacgatcagactccggttcagcagcttcatcaactgggacgctgtctgagagaggatttcttcctcgttttttgctctctgtaaaagctgattcgtatcaaacagtacctttgtccggaatgctgcctgcgcagacatttttgcatggtctttcagccgtgttgtcaacgcacaggtaatgattgcagaggtcagcatcagggcaaatgtaacctgataaccgggatcatacgcatggaatgtcaggcgcggttccgtcagaaaaaaattgtacagcgcaacaccggcaacagagcccagcacaccgcaggtgtagccgctggtacacaatgcggtgaacagcacccccagcatatagagcataataatattatagcgtgcaaagtccagttgtaagaaaaagaagccgatgagcgtgatgcagctcaggatgcctgcggtgatcagcagatcacggacagacggcagaagcggacgggtgaacagcttccgtcctgagccgtagccgttctctgcagaagcatccgggatgatataaatatccagattaggcgcagtcagcgtcaatttttcagtcagtgacggtccactccagaaatggcggcgatgtacgctggagcgccccagtacgatttttgtaatgccggagatgcgggcaaactctgcgatctgctgcggaatgtcatctccgtagatcgtagaaatgtcggcacctgcctgctctgccatacgaatgtgctgctgcaagcgccgacagtcttcttttcccatctgatccgaatcaggagtccggacatacagagctgtaaaggtcccgccgaacgcctttgccatcgttgctgccgtccgcacgatctttgcattggagggagaggacgacagacacgccagaatatgttcagtgggtgggtcgttctgattcataaagatcacctgccttgcccacagtatagcacaatttgatggtcacgaccaccagccgcgtctttttccttcctgttgaaggatctcccgtcgtatgtgatccagcgcatctgctgcccggaaaccactcaacatgactccaagaaccatcaataacaaaacgacatccatacgatccgtcctatctttttagagccggaaacacttctggatcgatgcgtatttccccaaaaccagcatactttcatcccggcacagctgcgtatccggcgtaatgctcatatcgagctttccgtcttttttcagtgcaagaatgttgatgttatacttttttcgaatattgatctcgccgatcgtgcgattcgtccattccggcggaatcgtcacttccatgatggcgtggtcgtcctgcagctcgatataatccagaatgtgttcggagctgtatcggatcgctgcccactttgccagctgcttttccgggtagaccacttcatccgcaccgttgcgcagcagaaacttggcttgtacatcccgctctgcacgcgagaccacaagctttgcgcccagctccttgagcagtgatgttgtttccaacgaactctgaaaattgccgccgatggttacgatacacacatcaaaattgccaacgccaagggaacgcagaaagtattcgctggtgctgtcaccgatctgtgcattcgtcacataggaaagcacagcgttcacacggtcctcattgctgtcgatggccatgacctgatgacccagctcattcagttcctgcgcaatatggcggccaaaacggccaagcccaatcaaaagaatcgatttcatacctgtctcctttatccgattgcgattttctcctgcggcagacgagagtgggcagggctgctgccaaatgccgcatagatcaatgtcaatccgccaacacgtcccaaaaacatcagtgcgatcagcaccccctgtgaaaggatgcccaactgcggcgtgatacccaatgtcagacctaccgttgccacagccgaagcagtctcatacaaacagactgacatcggcagctgctctgccgtagcaatgacaaaggctccgaggaagaacagcgtcaaatacatccctgcgatggtggcagcattcttgaccgcagaactatctatgcgccgcccgaaaaattccgcatcttctctgcggcggaaggttgcccacatattggccagcagaacggcaaatgttgtggttttcataccgcctgccgtagagccgggcgaaccgcccaacagcatcagaaccaccatcaatgcctgtgaagtgctgcccatcgcagcaagatcggcggtgttaaaaccggccgtacggggggtgacggattggaacatcgacaataaaatgcgctgccgggcagagcctgctgtgaactcgaagcaataaaagtacagcgacggcagtaccagaagaaacgccgttgtgacaaggatcaccttgctctgcatccgataacggtgaaaatcaaggcggtatgtacaaatgtcctcccatgtcagaaagccaaggccgccaaagacgatcagggccgcgatcactgtggtaagcaatgggtcacctgcataccgtgtcagcgaaacaaattttgccccctctgttcccagcaggtcaaagccggcattgcagaacgccgaaatggaatgaaacagtgcataccagatcccgcgcaaaccataatcggcgcaaaatgtcggcagcagcagtgcagcaccgaccagttcaaacagagcggtgatccgcagaataaagcctgtcagccgcacgatgccgcccatctgtggggcagcggtggcttcctgcatcgtgctgcgctgcttgagggagatctttcgcccggaaagcagcgcaaaggcagcgcccaccgtaatgacacccagtcctccgatctggatcagaagaaggatcacactctgcccgaatgccgaccagtagctgccggtatcctgtaccacaagtccggtcacgcaaagggcagaggtggaggtaaatagtgcctcatggaacggtgtaacgcaccgctgctgtgcagcgatcggaagcatcagaagcaatgcgcccaccagatcaactgccgcaaaacctgcaataatgacctgaaaagaagaaaaacggtgctgcctgtaacgaggatattgaatcataaaagctcctttacctgtccgtgtatataaagattagcatggaatagataaaagagtcgtaaagaaaattgtagaagtataaagattccattaaaattgatcgggcaacaccaaataacaaatgctggacatcaccagctcaaaaaacggtaatgtccagcattcatttatcgcaattttcaaaaatagtgccaatcaaaacggcatctttgcgatatgcagtttgcggatgttgcttgtgcattaaaaacgcaaactgctatagatttctagtctatggctcccggccacattcttcaaatattcctccgggtcaccgttcagaatcaaatccgcatagcccagcgggtcattatagatgaggtagtccaactctaccctttgtgccatggtcacatccagcgcatcctcaaccccggtgcagtcgatggaaatccttctcccatcccggagcagcagctccacacagccggtatccatgttgaacttgcaggctctttcatcgtacttcatgtttgtgtcccttccgccttacggcactctcacagtggtctgtcgtgctttcttatgataaggtctaggacgtttttggatggaagcaagggattcgttctgttttccgaagagtcaaaatcaccggcggaactggtgtggttgtcgttcgctcaagctacccaatacaaaagcacagccccaccttggcgaaggagaagccaaagcggggctgtattcaatgaaggagaaatgaagggaatatcaggttacagattcagttcaaactgttctgccgtgatggttgctttgccatcggcagcaaaggtgatgccgtcggcagactggggcgtgtagatccatgcggtcatggtctgctcaccatcgttggcgaaaacttcgatgctgtttttgtccagcaggatgcggagcttgagcgcaccgttctggctgcgcaccttgcagctacgggtatgcacgatgtcggcacgggaaccggcatagctgcgatccagcgtcagctcggaagtgtaggggtcgtaggtcaggctggtgtgatggtctgcgtcggcggccagcttcagggtaaaggagcggtattcgccgggctgcaccgtgacggtcaggtcggccacacggcccttgatgccttccagagaagtttcaccctgcaccgtcacattttcgtggaaggcgcgcttaccgtggacggcgtccagctcccgcaccggggtctgaacaatgcgtccgtccttgatgtgcagctcgcgggggcagatggtctgcccgaaccacttgcagccctggggcttatcctcggtgtccgaccacgtttgcagccatgcggtcatgatgcggcggccatccggggcaagggtggtctgggtggcgtagaagtcgatgccgccgtccatcagctgcacattttccttggtgaaggtgtgggtggcttcgtcgtagttaccgatgaaggcaatgacgttgtgaccattgtggaactcgcccttgggcagcatctccatggggccgagcatcaggacctgcttgccatccagcgggaagaagtccgggcactcccacattttgccgtactgattgttgcagcgttccagcaccgtgacaaagtgccagtcgaagccgtccttgctctggaacagtgccgctgcgccgctgtcgtcctcggcccggcagacggtgacggcggagtaagtgccgtcggcctcacgccagatcttggggtcccggaagtcaaacttgctgaagccttccggcaggtctttctgggtcagcaccggattgcaggcaggcttttcgtagtcgagaccgtcaccgatagcgatgctctgggtctggatatcccgcatctccccattgggctgcttttctgcaatcacgctggtgtacatcagcagctgcttgccgtcatccatctcggtggcagagccggagaagcagccggggccgttgtccaccggggaatccggggcaagcgcacagggcagatactcccagtgcagcaggtcggtgctgacggcgtgaccccagtgcatgggtgcccaccgcacatcgtaggggttatactgatagaactggtgatacttccctttataataagagaagccgtttgggtcgttgagccagcccacataaggggtcatgtggtaggcagggcgttccgccggggaaatggcagcgccatgctcggcctcgtaggcacgggctttttgtaaagtcaaatcgttcatggaatcctccaaaggaaagaatccttatgcgtagtaagcatccagatatttctgcataatacccagatagtcggacaggccgtaggcttccagcttgctcagatagtcgttccactctgcatccgtagtgccgttcatgatccagtccgccttctgggtattcatgtaggtctgcagatctgcctgcaggttagagacctgctcggtatcctcgctgctcataaagacattgggatagacataatcgttgttcatatccggggtgtagatgtccttgatccagtccagacggtactgtgcatcgtccgggcaggtaacgtatacaccatagtaatcatccagaaccgccagaggcccgctgacacactgcgcttcacggacttccacgggagaagcatcgcccagaggagcgtgcttcagcatgggctcgcccttatcgttggtggacagttcaaaaatgttaaagccttccgcatcgccgtaggtaccccagttgttctgcggagactggaggggtgcgtacatctgatccagccatgcacaaaccaatgcggggttatccgcctttgcggtgacaacgcatctgccgcgggcaaagccgctggtgaaagagccgttctgcggagtgatattccgggtatcggcggtcagggcaggcagcggctcccagtcggtcaggttgtcaatgttggcaacatcccagctgaagcagacaccatagcggccagccttgcccttggaaacataggtggaccactcctgcgtgaagcactccgggtcaatgagcttctcggcatacagcttgtgcagccagtccagaccatcacggtagccctgctgggtggcggcacagataactttccggtcattggtaacggcaatatggcggtctttgtctgcatcgccgtagccttcgccaaagccattgatgaggatgctggggtcctgatcgccgttgttgacgatgcaggacatggggatgatgtcgccgtcaatgccatactctgccttgatagaagcggcgttatcacggaatgccatcagcacctgctcaaactcgtccaccgtggtgggcatcgacaggccgaggaagttcagccacttggtattgatgaagctcatgttgccaatggtctggatggcggtcttttctgcgccgagctgctcgatccagggcagtgcccagatgtggccatcgctgtcggtgcacatggtacggtactccgggtactgctcaaagaccttctggagataaggcatattgttgtcaatgtagtcttccagattgaggatgacaccctgatctgcgtagcgcagcagattgctgtcggtaaaatcagcagtaaaaacaaaatccgtcagggtgttggggttggacatattcagggtgatcttatcgctccactggtcggactggatggcggtccagtcgatgtgcacattggtctgctcttccagacgcttgaagatggtgcggttgttcggctcgggttcgctgcccacagggaagctggtcataccggtaaaggtgaccttttcggacagcggaaatgtaacggcaccggtcgtgtccacagctgcggcagcagaattaccgctgccggtggatttgccgccgccacaggcagacagagcagcggcagagcccgccagagcgcagaccttgaggaagttgcggcgagagatcagctttttcatggtattttctcctttttatgtttcttttttcgtgtaacagatgagcgtacctgcttataaaattctggaatatcctcagcctttaatggaaccagccatgatgccggcatcaaaatacttctggaagaagggatacatcaccagcagtggcagactggaaataataatggttgcatatttgagcagctctgccatcttcgcacgttcggcagtactctggatatctgcgatcatgccggattccggctggctctggatcaggatggaacgcagcaccagctgcagcggctgcttcgatgcgctgttcaggtagatcatggcgtcaaagtagctgttccacattgccacgaactgccacagagccagaactgccaccaccggcatacagacgggcagcaggatcttgaagaagtaaagcatctcgctggctccatccacatccgcagcttcacgcagctcacgcgggatgccttgataataggtacgggcaatgatcatgttccacacgctgaatgctcccggcagaatgactgcccacatggaatccagcagacccagattgttgatgagcaggtaggtggggatcagaccgccgctgaaaaacatcgtgatcacaaacaaggtgttgaagattgctttgcctttgaagtccggcagcgacatgggataagcggcaagcatcgtcacagctaccgagatgatggtgaagatgatcgagtaaagtaccgcgttcttgaagccgacccagatctgcttgtccgaaacgacacgctggtaagcatccagactccacttgctgaaatcaaaggagatgcccttgttttgcagagtgaccgggtccataaaggacgcgatgacgatgtagatcatcggaacgatgatcgccagcaggaacaaacccagaagtgcgtagccgcagtacaggatgatcttatcttgtctggtgtagagggccatttttgattttttctgttttgccatggtaaacccctccttacaagcccttgccatcgttcattttggcaacgaccttgttcactgcgatcagcagaatgacgttgacaatggtgttgaacagaccgactgccgtggagaagctgtaatcgccgtccaacagaccctttttataaacgtacgttgcaatgatctcggcagtgttcaggttcaggtcagtttgcagggcataggccttttcgaaaccgatgctcatgatgttgcctgcctgcaggatgaactgaataacgaccatatccttaatggcgggccactccactgtcatgatctgctggatcaggtttgcgccgtcgatcatagcagcttccttcagatctttgctggcgttagaaagggatgcggtgtacatgatggatgcccagccggcaccctgccagatgccgctgatgatgtagatggggcggaacgcttccggcagcgtcataaagttgatgctggtgtgaagcaggccgttcaccggaccggtgacactcagcagcacccggacgataccgcacagcacgatgaccgagatgaagttgggcatatacagcaccagctgcaccttctgcttgatcttcttgctctcgatacggttgagcaggaatgccagcaggatagggatcgggaagccccacagcagaccgtagacgctcagcttcagggtgttgatcagatagcgctggaagtccggcgaggacatgaagcgggtaaagtttttgaagcctacccactcgctgccccagatacccttgaagggattgtacttctggaacgcgatcagcacaccgcccatgggagcgtacttgaacaccagcgtcagcaccacagcaggcagcaggaacaacaggtaaagctgccaatgccgtttgatgtagacccatgtgttgtgcagcttgcgttctgctgtcagcacagccgtttccggcgaggccgtctttgctttcatgaatcattctcctcctttttgatttgcttgccgtttgatttgtgttttacatttgcacctttgaattttacgttttcttcacttcgcttgtgcaaatgtaaaactctgtaattcatttataccacgcatacaggcgaatgtcaacgataattcatggtatatatcaagaaatactgtggatttgtacagatgcacaaatccgaaagcgcgcagatatgcaaaatgctgatttgcatttttgcatttgactaatttgtgcatttgcactatactggagtcataaagaataagatccgtcaccagactttatctataaaagaaagaggatgacttatggcaaccaaagtcaccattcaggatatcgcaaacgagctgcagctttcccgcaacacagtttcaaaggccatcaacaacaccggtgtgctggcagatgctacacgggaaaagatcctgcgcaaagccgccgaaatgggctataagcagtttgcctatctgccgctgtttcaggaagacgctgcaaaagcagcagagcctttcattctgccgagtgacaaacgggagatcgccatgctgacgacccagtttctgaacagctctcacttttcctccatgatgctggatcgtttccaggcggaaatcgatcatctgcatagctgtatgaccattcatcgcatttctcccatagagctgaaagagaaaaaacttccatcttctctcaataccgagcgcacagccggcatcatctgctttgaagtattcgactatgactacgcacagatgctgtgcgatctggatgttccgctgctgtttgtagacacccctgtgatggatatgcgtcctcctcttaaagctgaccgcctttatatggaaaaccgcattgagatccagaatgcggtggctcacatggtccagcgcggcaaaaaacgcatcagctttgcgggggataaaaaccactgtcagtccttctttgagcgttatatggcttataaggatgcaatggagcactttggtctgacagaaggcctgagcacctgtgcgatgccatctggacagcagaactatccggcatccctgtacgaaaccatccgtcggttcaaaacgatgccggatgcctttgtctgcgccaatgactttgttgctatggatctggtcaaggcattgaatgagctggggtattcggttcccgatgatatctgggtctgcggcttcgatgacagtcaggaggcttcctactttgtcccccgtttgacttcgatccatatccatgaacagatcatgggctacaccgctgccaatctgcttatgacccgcatcgaagagccatcgctgaactatcgcaccgtctatacggaaaccaacctgatcctgcgcgaatccacaggagattgagcgaaaggagaatccccatgcgtgatctgtgcaatacggacaagccgctgtttgctgtgctgacgaaattgacttacagtgcttacctgaacatcttatggctcgtgtgcagcctgcccatcgttaccataggggcttctacgaccgcattgttctacgtcacgctcaaaatggcggaagatcgggacgatggtctgactcggatgttttttaaggcgttccgggaaaattttaagcccgccacaaaactctggcttatcctgctggcagtcggcagtttcctggctgcggatggctttgtgctgcgccgaatgtggagcgaaaacattttctggacactgctcactgcaacgcttattggtgcggcagttctgtacggcattgttctgctgtatgcctttcccctgctggcacggtttgaaaacaccaccttcggcatcctgaaaacagcgtttctcgtgggtgtccggtatctgttttgcaccctgctgatggcggcgatctatggcatcatggggtacgtcatagtgtttgtgttcacgcctgcattcctgctgggcatgggcttgtgcgccatgctctgctcctttctgatgcttcggatcctctatctgatcggtggagaccctgatgcagtacacgaggaatacgaccatgacaaaaactgaccgggatacgctccgctccctccatgggcgcaaaaagtgggagcacatctgggcatattacaagctgcccattgcgatcgtgctcatcatcgtctatatccttggctatgcagcctaccgccatgtgacgaaaaaagaggatgtgctttaccttggtctggtaaatatcactgccgggtctgatctgacggaacagcttaccaccggctttgccgaggcgcagggtctgaccaaaaagcaacaggtcgatctgctgtccggcttgctgctcagcgaaagcgaacgcgcagaggagcagtatgtatatgcttcagagatgaagctgctgggtgcagtcagtgcccagcggttagatgttattctgatggacgaatatgcacgggatcgactgttggcagatgattattttctcgatctgcggacactggatgcgtctttccgtgcactgtcgggtctgaacgccggtgggaccgtgctggatatttcggatacgccgtttgtcaggcaggcaggtttttctggcagggtctatcttggggtggtgcagaatgcaccgcacccggagcgtgcagccgcttacattcattatctgttccagcggtaatcgttgggtttcacatcatgaataaggagaagtatcatggacattttaacgattggtgaagttttgatcgacctgacccagaccggcaaggatgcgcgcggcatccctcaatttgccgcaaaccccggcggtgctccggcaaatctggcggtggccgcttctaaactgggcgcacagactgcctttatcggcaaggtgggtgcggatgcctttggccgctacctgaaagaggttctggcagagaacaaggtggatgtttccggcatggcggtggatgcagaccaccccaccaccatggcggtggtctcggtagatgccaccggtgagcgggatttcagcttctaccgcagcgccaacgctgatgtgatgctgtgcaaagaggatatttcggacgaggctctgaaagctgccaaaatcgtccacttcggttctgtcagcctgaccgctgacccctcccgcactgccacgctggacgctgccgcccgtgccaaaaagctgggtgctgtcattacttatgacccgaattaccgtgccaacctctggaagaacaaagaggatgccattgctcagatgaaagcacccctgccgctggtggatatcctgaaagtgtccgatgaagaacttcccctgctcaccggtaccactgactgcgaaagcggcacggcacagctggcgcagaacggcattcggctgatttttgtcaccttgggtgcaaacggcgtattctaccgctttggggacaagaccggtcatgtggctggcgttccctgcaaggtgggcgacaccaacggcgcaggcgataccttctttggggctgctctgtccaagctctgcaaggaggagctggacaccctgaccgtggacaagctggaaggcattctggcctttgccaacaaagcggcaagcattaccaccagccggcatggtgctatccctgccatgcccacccttgcagaagtggagggctgaaccatggcagcaaaacaggaatttgcgtcccggtttgccaagcacaaggacgagctggaatggctgttcatggaactgtaccacaaccgggaaggactggaagttctggagcgggagatggcagaagcctacaacgcccgcagcgccgagctgaaagcgctggacaaggcacgctctgccgacccggagtggtataagcggggcaatatgttcggcatgaccatgtacaccgacctctttgccggaaatttgaaagagttggcaaagaagctgccctacctcaaggagcagaagctgacttatctgcacctgatgccccttttgcagatgccccacccccacaacgatggcggctatgcagtggaggattttgacaccgtagaccctgcccttggcaccaacaaagaccttgaaaacctgacccgtgaactgcgcaaggcaggcatcagcctgtgtctggattttgtcatgaaccacaccgccagcacccaccgctgggcgatggcggcaaaagctggcgacccgtggtttcaggcctattaccacctctacgaagaccgtaccatccccgaccagtacgagcagactgtgccccaggtgttccccaacaccgcgcccggcaactttacatggtgcgaggagatgcacaaatgggtgctgaccaccttccacgattatcagtgggatctgaactacgcaaacccggcggtgttcgtggacatgaccaagagcatcctgcaccttgcaaatctgggcgtagaggtgttccgcattgacgcggtgccctacatctggaagcagctgggcaccacctgccgcaatctgccgcaggtgcacaccatcgtgcggatgctccgcatggtgctggaatgcgtctgcccggcggtcatcctcaagggcgaggtggtcatggctcccaaggagttggcggcgtacttcggcacacccgaaaagccggaatgccatatgctctacaatgtatccaccatggtcaacctgtggggtgcccttgccagccgggacacccggctgctgaaggcgcagctggatgccctgcacgccctgccggacaactgctggttcgtgaactatctgcgctgccatgatgatatcggctggggtctggacgaggcggtggaaaataagctgggcattgacccccagaagcacaaggaatatctgtaccacttctacgagggcaatttccccggcagctgggcaaagggcgagctgtacaactacgaccccgccaccggcgatgcccggagctgcggcaccactgccagcctgtgcggcgtggagcaggcactggaaaaggacgataaaaccgcactggattatgccgtgaagcgcgacctgctgctgcacactgccatggcgtttttgcagggtttccccatgctgaactgcggtgacgagattgcacagctcaatggctgggattacaaaaacgaccccgaccgtgtggaggacagccgcaatctgcaccgcagcaaattcaactgggaggacgccaagcagcgcacccggaagggcacgctgcaaaacgccttgtggcagggcatggagcagctgcgccaaatgcgtgcagacccctgctttgccccggatgcgtgggtgacaacatgggacagccacaaccccggcgtgctggcactggtacgcaagcgcggcgaggaaacgctggtgggactgttcaactttaccgagtatccggcgggagccagtctggacgctctgggcggcgagtatcacaccccggagggcacttccatctggctggcggatgtggagctggaaccctatcaggcgctgctggtaaaaaacaaataagtaaaacgagcccacctagctctctcttttcgccaaagttttcagcgtgttttcttgcacactgccgaaagcggcgtgttctcgaaactttttgttgacacagctcgatttttgtggtaatctatcccaacaatttaatataacatatttacttagagttccagctcggctcccgaaggagccggagcaagtttctaactttctatcgctacataacgaacccgaaccaaggccatcccggaagggatggtcaggttcaggttgttatgtggcgattttttattgccaaatccagcaccgcaccttgaaaaccgaaagaccgtctgcatgggatacccagcgatgaccgtccaagttcagcacacctctcagcgcaagtcctaaagcggaaaacacgactgtgaaaagcaaaagattgctgagccaaacggcagcggtggattttcccttcggaacagcctttccaagctgatggtcgcttcgcacacggttttgaacttcttcgggataagaacgcagccccatgagatttttcttgtccgtgcctgttccaagaaaacatacgccccaatacagaaaataaaaagcaattgcaacgatgattttcataagcctatatttccgttgaatccaaaaagctgcggatagagcattctgattcttccttttcttcagcctctttcgttttgagctgcctgtgcctgtgtcaggaacgccatgattctccggtaaaattcctgcggatacatcatcacaagctccgcgtgatccatcttcggaatttcatgcagttgcgcccgtggaaaatattgctttataaagcagatattgctgtgtcgcgcctgcttttcctcttcgccgtaccaatacgtgatttggcagcccatttcagccggcttcgtcggcagagtatgattgttcgccgaccagaaaatgttgcggacggtgcgttttgaataggttttcagatacgccgccagcgcgtcatattccttcactggatcgcgccccggcatcgtccagcgctctggcggatagaccgtctcaaggaccttgcggctcttcgctatgagcctgaaaccaagatcgtctcgcaggcaagcgagacggcgcaagatcagcggcatccgatacggcgtaatgcctgcatcaataacggcgcgctcgaccgggatttttcccaaggcgagaaagcgtgtcagacacgccccacccagagaacagccgtatgccgcgttcaagcgggtaatgccgtgcgcttgcagccaatctgtcacctcgtctactgtcgtctccacagagataaagtcttctcccgtttcgccgtgaccgtcatagacgatctgaatcacatggtaatcctgcgaaagcaggccaaccgagtcggcgaacgcccactccggctccgccgtgcacggcagaaacagcagcgtcttttcatgttcttttccatattccaaagttctcataccatccgccccttggtttttgcagcattatttttccggattacgctccgtcatcgcgccaaagaatgccggtgcgccgcctgcacttccttatcttcccacgcccttcaagtacccgctttttgagttttcctcagtatcatcggattcatcataggcatcgtaaagcgcattggggtcgtgggctcttttcttgaaaggcgagcacagctcatttttgtgcgcaaaggcaaactccatgttgtccgtccaacctgtgtgaccggtaatgaacagcggatgcagcccgcgttttttcagctttttctccagcaacgccaaggacttcaccgccagcttgttgtcctccgccagcgaggaaatgaagctgtaaccgccgtccgcaccaaaccacagtgtgtcgccggtaaacagatacttatcgtcaacgagatagaccatgtgcccccatgtatgaccgggaaccagaaaacactcgatcctgatgccgccaatgtcaaagacctcaccgtcgcggagcagcactttttcattgttgatcgccacctgcggcagcttgtaaagatggtaaatgaccctgcggcgcacctctccggtcagatagcggttctcgatcgcgcttatgtacagcttcgcattccggaacagccccggactgtctgcttccaccgcacccacatggtcggtgtcctgatgggtgataaggatatggtgtatcgacttcggatcaatcccaagccagctcattttttcggcaaggcggtcgtagttatatcccggcatcgatcataatggtggtatcgcccttgcggtagaagaagatgttcgccacccattcgcgcacgcaggcaacattctcgtcgatccagccggtgttcaaaggcttgaagatctccttgccccggtacatccagttcattgcttttctttgaaattccgttgcctttttcgacatgatcgcacctcatttctgtgctgtgatgcacagccagccctttttatttttgtggttctggatcttacaaaatcctgcttgctccagatacgttttaccgttcacaatgcaatgctttttaccagatgcgcccactgctccgggtgacaggccagcaattcttcgtgctgcaagttctgctcatggagaacaggatgtgcaaaatgctgctgataccgggcacgatattttgcgcccattttcagggcgtaaaaaatatggatttcggtaccgggcacatggatcttatccggcagcggagtgataagatcggagtagaactggtttttgcagctctgcatggtcacataagggcgggcatcgccaaacattttcagaaaagccttgacataatcccccgactctttagcacacttgtccagccgcttttggagaaatttcgccttaatctttccgtcccgcaccacagggtagatcaatggcagcagaaaatcagtctgcaatcttgccgccagcggcgatgcctgatccagatcggagctgcccagaatgccgtagtccatgtggatgttctgtcgtgccgccagcagccccacaaacgagccgcccagagagcagccgtaggccgcccggatgtgaccgccgcagtggggcttgaggtaggcctcgatcttttcggtctcctccagcatggtgggaaattcggtctgttcagtctcatcaaagccatcatagctgacgcacagcacccggaagctgtcagccagaagcgggatcacggcaccgaaattgctttcccaatggcaacaggtgcccggcagcagcaacagcaccggggcatcctctgcaccaaaatagtagatcttcatcctgatacgctccttctctatttattttccacctgtaaatagaagagatatatttcttcgtatagggcagagttttgagttaggtatagctaacttttggtcttataaaaagccgcttttcagcggtccttctgccaaaataatacgccctgctgttgtctctgtcaagatatttaggcgttttcggagattccgaaagagatttcgttatcgaagtctcccctcgccgcatgaaagatgcaaatcgtttcctgcatcgaaaaaattcacctctgcaaacttgtctgtttctgcttgacaacgccctgtgggagtgctattttaatcccacagattcgttctgcctaaccatttgaggggttttacccctgcattttttgcacaaattgttagtcggtactaaccattttcaaaactgagatagaggtatgttacaatgagattgaaaaaggtatttgcaggtgcacttgcggcggctatgctgatgtgtgccgtggcagttccggccttcgctgcgaaagaggtggaacaggaaaactgcctgacttccagctatgtccagatgaacatcccctacgccgacttctacaaggctgccggtgtggacaacgcatctgagattgacgctgttaccagcgccaccaagaacaagacccgtgcaggcaaccttgccgccggttcctaccatgtcaacgcggacggcaccgacatcaccggtgtttccttcccggtcaagattctgaccccgtgggcgctgaagaacgcaaagcaggtcaccgatgccgacagctacgacatcacggtcaaactgcggggcaaggaatccactaccacctataccggcgcggatgctctgtttgagaacgacagctacgcttactacaagctcagcgagacccctgcctactacattaccgcatggtataacctgctgagcggcaagtgggagtttggcaaggtccacgccaccgagaccaccgtggagggtgtcaccgtggagctgaccaccaatggccgccacacgaattatgagatgaagctctccggttttgatctggacaccagcaccaacaaggtctacggcgtggtgctgaccgccgccgatggcagcgagtacggcctgcatcatgtgaccaacatctggcgcggcactgagctgggcttcaatacggacgagccctaccttgcgtccatcatcggcaagaccgtcacccagatcacctactacaccgccgatggcgtgtatgttctgccagtcagcgtagcgttgtaaagtcgcgggcaactgcctgatttagcaaaatgcccgataatgcgcagcgtgatgtgattctggagatcattcacaagcacaaggactaccttacttctctagaagccgcactcacagatgttaaaggccagacagcataacatcaggcacatggtatgctgttcacagatgtccaaaggagcgtgcgtttgaacaaaaagaaaaagtccacaaacacttccccctatcccgatgaagtcatcgaccgtctggcacgggcattctacccggccatccttgcctgctggaacagcgaggaaggccagcggtcacttgtcggggcggaggcccctccatcttgctaacgcaagaccgttcggtcgctcaaaagccccagtggggcttttgttgctgcgcaaacgcgagcttgccttggcaggcggaacaggctcatcacgccactagtaaagaaaaacagagcgttcccgactgctgggtatccgtaaaacagttttcgaaaaatgacacggcaactgcctgtcaggattggttacggagtacccggctaggccgaggaagcatcaagtcccatgtccgcaccgttaaggtgttgggtatggggctttttgcatttcaggaacgtatacacctctggaaaggtgtaacacactagactttgtaccaaagtcgtgtgccaagggtgctgcgcccctttggaatccctgcttacatcgcctgtgggcgatgtagattcgccgcacagaaagctctcacaaaaggcacacccggctgtctgcggcgaggaaaaggcacttctgcggaagtgtaataacccactatgacactttcatccctgtggtctgcaaagtgtagtgggctctccgagggggaacggctgtatagagtgcgtttcgggcaaatcgccgcatacgtgtatacggaagatgggtacgcacgtacgcagtaaatcggccaagttctcccatgtagagggtgtaatttcgataaagaacgtggtataattgactcaacaaatcgatttgtggaggcgattatttatgaaaaaagaaaccaagaaatctatcttattctatgcagcttctgctctgttatatatggcttcacttattagcttcataagtggaaatgataattctatggctgttgtatggttgtgtcttggttcatcatttctttgccttggctcgacgcatctttgtttaggtttgtctcgtaagaaaaagggaaacgacaaaaccgatgcaagcaataaataaattcctagtatatcgcactcactcctaagcagggtttggggcaggcacgccccaacaagaagctgtcccaaaagggcaagaattttcaagaattgaaaatttgtggccacgggacgattcttgctctcacgaaaacccatactttttgaaaatccgcttttcgcagccaaaggaggatgcaccatgaaaaaagagatcgaagccttcgtcaacgcagccaacgaacaggagttggaagccgcatggaataacctctcggcagaggaacagcgagttttcgagcagctcatggaggaagaaccacccgaagatgcactggcatttttcgcacagctgtatgatgatgccccgaaagagcagaccagcgagactgtgaacatctccgaaaatgaaatctatttcaagcggaagcccttgaccgaagagcagaagaaacacagctcttatgtggacgagaacggcaacctccatgtcaagaacctgtccgctttctggattccagaactgaccaccacggagaaagtcggtcacaccacctacaccgtgaccggcagctatgagggcaaggagtcctttttgaagaagctggagcgcattgttgccaagaacgcccagcaaaaatttgaagatgagggtgcagacgaatgacaactgcgtccaattctgctatacttgacccggtaaccaatcctgtaccgacagttgctccacagagtaaggaggacacaacaatgtctggagcaacgaataaaatcaccgcactttactgccgactgtcgcaagaggacgcacggctcggcgaaagcctgtccattgagaaccagaaggctattcttctggaatacgctaagaagaatcactttccgaacccggtgttctttgtggacgatggatattccggcacgaactacgaccgccccggctttcagagtatgctggtcgagattgaagcggggcgtgtaggaatcgttatcacgaaggatttgtcccgactgggacgcaattctgccttgacaggtctgtacacaaacttcacttttccccagtacggcgttcgctacattgccattaacgacaactacgacaccattgacccgaacagcgtaaacaacgattttgcgggcattaagaactggttcaacgagttttacgcccgtgataccagccgcaagattcgggctgttcagaaggccaagggagagcgtggagtaccgctgacggtcaatgtgccgtacggctatgtgaaagacccggagaacctgaaacattggcttgttgatccagaagcggctgcaatcgtgaagcgcatcttctccatgtgcatggaaggccgtggcccgacccaaattgcaaaccaactgtgggtggacaaagttctgactcccaccgcctataagttgagccatggcctgagtacgaactcacccgccccggaagacccttatcgctgggataaaagagcagtaagttcgattctggaacgcctggagtacactggctgcacagtcaactttaagacctatactaactctatctgggataaaaagagacatctgaatcccgtggaaaatcaggctatcttcccggatacacatgagcgcattattgacgatgatgtgtttgaaaaggttcgggagattcgtagccagcgtcaccgcatgacccggacaggcaagagcagcattttctccggtatggtctactgcgctgactgcggttccaagatgcaatatggttcgtccaatcacagggacttcagtcaagacttctttgattgctctctgcacaagaagaacgggagcaagtgcaagggacacttcatccgggtaaaggttttggagggccgtgtgctaagccatgttcagcgggtgacggactacatcctctgtcatgaggactacttccgcaaggtcatggaggagcagcttcgggtggaaagcaccgaaaagctgactgtcctgaagaagcagcttgcccggaatgagaagcggatcgcagacctcaaacggctgttcatgaagatttacgaggacaatgttaacggaaagcttagcgatgaccgcttcgacatgatgagtcagagctacgatgccgaacagaagcagctggaagaggaagttctctccatccagcaggaaattgaagtacaggaacagcagatcgagaatattgaaaagttcgtccagaaagcgcacaagtacgttcatattgaagaactcaccccttatgctctccgtgagctggtgtcggccatctatgtggatgccccggataagtccagcggaaagcgggtgcagcacatccatatcaagtacgatgggctggggtacatccctctggatgaactggaagcaaaagaaaaggcgtgaccgaagtcacgccaaatcttccccatttcgggagcttttgcaaatactgttttatgggaactctgctacggggaacgccctgttgtacatatcgctatcgtctgtggcttttggcagggtgcgtccgggtgggcgcaccctatttttgtttcatcatggttgggtgtacgtcaaaacgtatttaccgttttttctccttggctgcatcgtggttggttttgcgctgttccaccatctgggcgaaccattccaccattgcagggtcgtcgtgagcaaagaaggcactggttttggtatccagtgcggcgatcctttccatgtcctcagaggacagcgtaaagtcgaacacttccagattttcctgcatccgctccctgtgggtggattttgggatgaccactacgccccgctgcaaatgccagcggagaatgacctgtgctacggttttgccgtattttgcgccgatttctgccagcacagggtttgtgaacatctgactccgaccttcgccaaagggagcccatgcctccatctgaacgccgtacttttccatccattcctttgccttgccctgctggtgcagcggatgcacctctacctgattcaccatgggtttgatacgagcaaagctgcacagatcaacgaggcggtcaggataaaaattggacacgccaatggcccgaatcttgcctgcctcatatagttcctccaaggcgtgccatgcgccgtagtaatcagcaaacggctggtgcaacaaacaaaggtccagataatccgttcgcagcttacgcagggattccagcacagatgccttggcctccttataaccgtaatgctcgacccagaccttggtggtcagaaaaatatctttgcgatccacacgagatttttcgattgctgtgcccacctgctcttcgttgaagtaggattgtgccgtgtcgatggagcggtagcccacctgcaaagcatccagtacacagcgctcgcattcctcctgtgagacctgatagaccccatagccaagctggggcatttttacgccgttattcaatgtgatatagttcatataaaagcctccctgctgagatgatcctgtgcttatcaccgcaactccttataggtttcttccggcatcggctcgcaccactcgttagaggtgccttcgccgggcacttccactgccagatgagagaaccagcaatcgggtgcagcaccgtgccagtgcttgacctccgggggaatgttcaccacatcgcccggatgcagctcctgcggcgctttgccccattcctgatagtagccccggcctgccacgcagacaaggatctgtccgccgccctttgcagcatggtggaggtgccagttgttccggcagcccggctcaaaggtgacgttgtaaatgccaacctgtgcggtggacaagggtgccagatagctttttccactgaaatactgcgcaaaaccgtcgttggctgcgccgatggggaacaccatttcactctggtgctgtgccttggcatcctctgcagattcctctgcccagacttccttggccatgcggaaagccgcccacgccttgggccaacctacataaaacgccgcatgggtcaggatctctgcaatctcagtccgggtaataccgttgtttttcgctgccgtcaggtgataccgaaacgaggagtccgtcagtccctgcgccatcagtgccaccaccgtcacaaggctgcgatcccggagggagagtttatcctctcggctccacacctgcccgaatagtacctcatcgttaagttctgcaaattttggtgcaaattcgcccagagcatcccgccctgctgtctgtttcactgccattatacattcctccccatctcgtaagcctgtgccatggcaggcgtaccgcacactgcacccgactcgtaaacgccacctgctacaaggactcccttttccacggctccttccacgcagtctgcatagccccggaagcaggtcagcgtagtgtccgcagaggctttttcctcgtctgccatggtggtgatgtagtagaattccttgtctttgacctcaagccaccgtgccacggtacggtcgatcaccgccttcaactgggcactgatggagtagaagtataccgggcttgccagcacaatgacatcggcatcgatcatcttttgcaggatgtctgccatatcatccttgtggacgcaggctccgccgtgggtgctgcagtagtagcagccggagcagggagccacctttttctcagcgacccggatcttttctgctttgtgcccggcatcctgtgctccacgcagaaattcatcgcatagaatatcagagttaccgcccttccggggactggcagacaaaatcaataccttcttgctcataggaacctccttgacagcggagtgcatccgcattatgatgttgataaagtttgattttatcatacaacttaaagcgcactttaagtcaagggctttttgaaaaaccggaggtttcagatgatctataccgtaggtgaaatggcacaaaagctgggcgtacctgcctccaccctgcgctactatgacaaagaagggttacttccctttgtggagcgttcctccggcggcattcggatgttccgggaaaacgacttcgagtggctgcaggtcatccgctgcatgaaaaaagccggaatgtccatcaaggatatccggcagtatattgagctttccatgcagggagacgacaccattgacacccggctggaaatgttccggcatcagcgcgaggtgctcacccaacagatccagcggttacagcacacactagaaactgtggaatacaagtgctggttctatgaaaccgccaaagccgctgggacagtggatgtccccggtgcgatgaccgatgcggatgtacctgatcagttccgtgccatccggcaggagctgcggggacagaagattccgaatggcgaaaaataagaaatgccgttccagttgcttttggaacggcatttctcttaatcttctaacccatggctccctgccacatttttcaagtattcctccggctcgccgttcagaatcaaatccgcatagcccagcgggtcattgtagataagataatccaactccgacctctgcgccatggtcacatccagtgcatcctcgatcccgatgcagttgatggaaatttttctcccatcccggagcagcagctccacgcagccggtgtccatgttaaacttgcaggctctttcatcgtacttcatgtttgtgtcctttccgccttacggcactctcacagtggtctgtcgtgctttcttatgataaggtctaggacgtttttcgatggaagcaagggattcgttctgttttccaaagaaaacaaaaaatccgaacccttctcctattggaaaaaagttcggattttgttgttgtggtgcacctccagggactcgaaccctgggcccactgatcaagagaaaccaacgtgcaacaatcgtcagttttcagaattgcgtcaattcgttatttttgttggtttatcgtgaatttatggtttgcatccgctgcattctttgcacctgccatcccctcttgcatccgttatccagccgttccggtgtgcaaaaatgtgcagagccaaaatcagccccttaaaacagggatcggatttttatgcaaagccgggaaaatggccgggttcaaactcaaaacggtagctacaatcttgcctgtttagcccaaacatcaaatgtacatcaacaactatgattcatagcagggatttggacaactacgatctcttataaatccaaagcatctctttctatgtggacttttctgggtgaaaatacccagagggttcacatttttattttaccggcagccagaccgttgtttttgctccgcagggggtgttctgctcgaacactgccgtgccgccatgggcggcggcaatctgctgcactacatataagccaaggatatggggcgcattttcggcaggctccgcagcgttcagtgccaccagaacggcagccggatagccaataccgtcatctgccacggtcaggcagaagcgctcccctgcccgccgggtgtgtacggtaatattcaccggcttcgggttatgccggacgctgttgttcagcaggttttccagcagccgtgccagcagcgcctcgtccaccgaaagcaccgtctgctctgctggtttttcctgttccagcgtgatctcgcagtgctctgctagcgggctttcgcaaaactgcgccaccagctgccggaacagcggccctgcccggaggtctttccggcgcaggggttgggcaccgtattccagcttactggtcaggttcaggtcatcaatgagggtgcgcagcttttcgcactgggtgcggatgccggccgctttctgccgggagctgtccggcaaaagtgcatcctgctccagctgctccgcccagcctaagatcagcgccagcggggtgcgcacgtcatggctgacccctgcgatccactgggtgcgggcattgtcccgccgggaaagcatctcatttttggcttgcagctgcgccccggtctggttcagcttttctgccagttccccggcaaagccgtcggtaggcagccggacggtctgcccctgtgccagtgcttccagaccgtttgccacggtctccagccgctttgccccccgccagctcagccagaagcagagaaccagacccagcagcagcattcccagcgctgccgctgggagcacccgcaccatgctcagggcaaagtccggtgagctgtaaatgctgtacttccacaggctcccctttggcagcccgatgacgaacagtccgtagggttctgtccagcagaacaccgggtaatccgccagataccagcgggcaaatttggcgatatcgccgggagtgtaggcatggttcagatcctgcggcaggccgtagctccagcggatgtttcccacatcgtccagcaccatcgcccactcgtagccattcatccactcctgcggggtgcgttctgccccaaaggcaagcccttcggcggtctccaccatggaatccgcaatctcgctggatgaatactcccgctgcggcaggcggcagccctcctgccaacccagccagcccagcaccgcaacaccggaaaacaacagcagcagaacaatgcccaccgccgccagcacataccgccggatcaggcgcacaaaggttttcatgcttcttccccctttgtcagcttatagccaatgccccgcaccgtccgcagaaactgcggcgcaccgggttcggcttccagcttctcccgcagatgccggatatgtacccccagactgttctcgtagccatagtaatctgcgccccagaccgccgcacaaagggcatcgtaggtaacgatgtgtccccggttctctgccaatttccgcagcagcgccagctcagtagcagtcagcgtcagtgttttgccctctggcagggtaacaatggcatcattcaggtctacgcaccgctcccccagctgcaaaggtgccggttttgtacgggacagctctgtccggtacgcccgctgcaaaatatgctgcacccgcagcagcagctcctgcatcagaaagggcttggtcaggtagtcatctgcgccaagacccagcccaaacagacggtcggcatccgcgtcccgtgcagagaggaacaatgccgggacatccgcttttgcccgcagcgcccggaacagcgaaaatccatccccatccggcaggttgatatccaggatcatcagctccggctgttctgccgcaaagcaggcgcgggcagcggcgcagctttgggcagttctaatatggccatatcctgcgccccgcagctgctcacatagcagtgccagcagctcggcgttgtcatccacaacgagaaactttgcatcataaatggtatccataagggcagttctcctttcccgcctttactataccacacttttcgcgccgcagcggaaaacacctgcaaatttaagggtaaattaagctgcgcttccggtcagtttaaggcagcgggtgtattctggcatcgttccgaaaaccatgaatgcgaaaggagaccatttatgaaacctgtgattgagacccatgccctttgcaaaagctaccatggccgtccggtggtggatcatttgaacctgactgtcccggagggctgtgtttacggatttttaggccccaacggtgcgggcaaatccaccaccatgaagatgctgctggggcttgtacaccccaccggcggcagtgtggaactgctggggcacaccctgaacgaagcaaaccgcattgccctgctgcggcagaccggcagtctgatcgaatccccctccggttacctgcacctgaccgcccgggaaaacctttccatcgtggctgacttgaaagacgtggaccggaaggacatcagccgggtgctggagatcgtgcacctgaccaaagacgctgaccggaaggtggggcagtattcccttggcatgaagcagcggctgggcattgccatggcgctgctgggcagccccaaactgctgattttagatgaacccaccaacggtctggacccggcaggcattcaggagatgcgcagtctgatcgcttccatgccgcagaccaccggagccaccgtgctgatctccagccacctgctgggcgagattgagcagatggtggatcaggtgggcatcctgaaccacggcaaactgctgttcgagggctccttgcagcagttgcaaaagcacagccggggcggcattctgctgcgggtgctggacgcacccaaagccgcagccgtcctgcagcagcagggagtaaaagccaccgcaccgtcagaccagccggacaccctgcagcttcccccgctgccggacgaagcgctggcggcgctggtctgtacccttgccgaaagcggcgtgggcgtagttggactgactgcgcagacaaagagccttgaggacatcttcctcagcctaacccagaccagcggggaggtggcgtaagatggcagctttccgtgcagaactgcaaaaagcccaccgtcggcacgaccttgctctctgcctgctcatccccggcattgtcgtgctgtgggtgggcggccttgctccggcagacccggaggagcttgccaacggttacagcgccctgctttacagcctgcccgtcattgaagccattctgatgccggtgatgatggcagtgctggcctcccggctgtgggatatggagatcaaaggcaacaccgccaagctgctctacaccctgcagagccgccgcagcctgtttgcaggcaagacggtctttggagtgctggaggtgctgttggttacggtgctggagctgacctgtgttccggtgctggggcgtgtccatggttataccgaagcctttcccactgggcagctatgctatctgttcgtctgcacgctggctgtggacacaatgctcttctttggagaatttctgctgatgctgtgggtaggcaatcccctgccggcgctctgcgtgggcattgtaggggcgctggtgggtctgttctctgcttttatgccgccgcttgccagttattttgtgccctttgggtactacatccctctgagcgcctacgaagtggcgaactgggacaaggccacccacaccgtcacctacggcacccgccccttcaactgggggctgttggccttcacccttgcgctgggcgctgtgctgtttgcccttgcgtggcgcaaggtacaggacgaggaggtataaaaccatgctgaaacgctgtattcttgcggagaaccgcaaacttcacgcatcccccatctgggcaatgttctttgtgctgcccattctttcagccacctacggcaccttcaattatttacaaaatcttgagatcctcaccgacggctggtatagcctgtggacccagcataccctgttttattccatgctcttcttccctgccatggtagccacctatgctgcctacttgtggcggctggagcatctggggcacaactggaacctgatcatggcaagccccgtaccgccgctggacctgtttgccgcaaagtttgcggtggtgacaaagcttgcgctgctgacccacggctttgtatttgcgctgttcgtgttctgtggcaaggtatttgcccatctgcccgggctgccgccggtcaccctaccgctgtttttactgcggggactgctgggtgcgttggctgtcattgccgcacagctggtgctggccatgatcatccgcagctttgccgtgcccatttttctggggctgctgggcggcattacaggcatctttatcagctccaagggtcatgggctgttgtggccctattccctgatgcaactcggtatgaactccaacaaaagtgcggatgctctggcgggcagctacgggctgtttgccttcagctgcatcttctggctggggacgatgttccttctggcatggctgcttttacgccgggaggatgtgcgggcataaaacagaaatctgcgtatctgctcctgtcaagagggctggcaccgtccggccctctctctttttgctaaagtttccatcgctttttcttgcaaactgccgaaaacaacgcgttctcaaaagttcgcgtttgcgaaacgtatggtgcgtttccggtctttcgctgcgtatgtgcgtacagagaaagccacctgctgcgtacgcacgtacgcagcaaaacgcccaagttctcccttataaggggtattggaaaagtgtcaggttgacagtttgcccggagcaagagtgcagaggggtgcgggtcgcctgcggcgacctcaaaaggccaccggccttttgaagcaccgaccgagccgacaggcgagaccagctctttgcaagggtcaagggtgaaacccttgccccagtgatatgatgctgtgcgtcatatcctactgggtattatctggcgcaaaatggcggcagatccagcagctccgctgctgcgcactctcccggcaagctgttgaaacggagattagaaaaatcatttatccacgaagtccacacgctgctcaagaccgcattttcctatgcggtggaatgggacctcatccacaaggttcccctgccccgtgatgcgcccaaggcaaacagtgaggaacgtaccatctgggacgaaaagaccatgctggcggcattgcagaccatcgagaacccggcactccatctggtggtgcacatgagcatgatcctttcgctccgtgagggcgaaatcctcggcttacagccgagtgatctggactttgatgccgccgatgggcgtggcaccatctcagtcagcaagaccatgcagcgagccaacaaggacgctttggaaaagctcgaccccaatcaggtctacaacaccttcccggacaggcatgagggcagcaagtcctctctcatcttgaaaaagcccaagaccaagaaatccaactgtgtcctgtatatgacaaagcccttaaaggaagaactgctggcatggctggaaaagctcaaacaggacgagcagaacgctccggaaaagtacagcaattgcgggcagctgttccggctcccggatggcttgcccatcgcaccggagctgctgacaaaatggtaccgcctgtggagagccgagcacccggagtttgaacagatcgtgttccacggtctgcggcactccagtgccacctaccagctcttgcagtcggacggtgacttcaaatcggtgcagagcaacaccggtcatgcaactgctaccgtcctgatggacacctacgcccacacgcaggacaaaccccggttggagctgaccgagaagatcgaagcaaatttttatttccaagacctgaccccagcagcacctcagccccggcaaaacgaaaagccggcggcaacaaaaatctccggtaaggagatccttgaagccatccggctgatggatgcagacgaacgcagagaattgacgagagccttgttcgcctaacttctcttctttttatgcaaaggaaagcaggctgtgcaaaccttgcgcagaaaagcccccgattcgggcaaatgtgcaaacggtgtgcagaaagtgcgcagccgcttttctacataaagaaagaacgccaaatcttgcgatttgacgttcaaaatttggtgcacctccagggactcgaaccctgggcccactgattaagagtcagttgctctaccaactgagctagaggtgcatatggtgacccgtaccggaatcgaaccgatgttaaaggcgtgagaggcctctgtcttaaccgcttgaccaacgggccatataaaagtcggcgactacctattttcacaagccgtttccagctaactatcttcggcacaagtaagcttaacttctgtgttcggaatgggaacaggtggaaccttaccgtcatcgacaccgaccgatttgactgaatcagtataacacatttctgtgcttctgtccagtatttcctgaaggacgtgccttcaaaactgaataatcactgctaacattttttcgttgacttaaaagtctcaagcgaattgtggtcaagccctcgacctattagtacacgcttgctgaatggatcactccacttacacatcgtgcctatcaaccttgtagtcttcaaggggtcttacttgtttgaaacaatgggatatcttatctttgggtcggcttcacgcttagatgctttcagcgtttatccgatccgtacatagttgcccagctatgcccttggcagaacaactggtgcgccagaggtacgtccgctccggtcctctcgtactaggaacagctcccatcaaatatcctgcgcccacgacagatagggaccgaactgtctcacgacgttctgaacccagctcgcgtaccgctttaattggcgaacagccaaacccttgggaccgaatacagccccaggatgcgatgagccgacatcgaggtgccaaacctccccgtcgatgtggactcttgggggagatcagcctgttatccccagggtaacttttatccgttgagcgatggcatttccactcacataccaccggatcactaactccaactttcgttactgctcgacccgtcagtctcgcagttaggctcgcttctgcgtttgcactcttttgcttgatttccgttcaagctgagcgaacctttgaacgcctccgttactctttaggaggcgaccgccccagtcaaactgcccacctaacaatgtcccccgccttgattcaaaggcgcaggttagaattccaatatcgcaaggatggtatcccaacggccactccacaaatgccaaagcacttgtttcccagtgtcccatctatcctgtgcatgcaacatcgaaacccaatattaggctacagtaaagctccatggggtctttccgtcttgtcgcgggtaaccggcatcttcaccggtactacaatttcgccgggcgggctgtcgagacagtgcccaaatcattacgcctttcatgcgggtcagaacttacctgacaaggaatttcgctaccttaggaccgttatagttacggccgccgttcactggggcttcgattcaatgcttgcacatctcctcttaaccttccagcaccgggcaggcgtcagctcgtatacgtcatctttcgatttagcacaaacctgtgtttttggtaaacagttgcttgggccgattctctgcggctccatctctggagcaccccttctcccgaagttacggggtcaatttgccgagttccttaacaacccttctcccgttggccttagaatcttcttcctacctacctgtgtcggtttgcggtacgggcaccgcagaaatacacacagcttttctcgccatcttccatcccggacttcggtactaacttccctcgatcgctaccggaaccaacacccggctccgagacttcaaatgtgtccctgtgtttaactcttttggtggtgacggaatctctaccgtctgtgcatcggctacgccgttaggcctcaccttagctcccgactaacctggagcggacgaaccttcctccagaaacctgaggctttcggccatgcagattctcactgcattcgcgctactcattccggcattctcacttctatacactccacagccgcttgcgctactgtttcaccgcgtatacaacgctcccctacccaatacattgctgtattgcctaagcttcggtgtcaggtttagccccgttaaattctccgcgcaaagacgctcgaccagtgagctattacgcactctttgaatgtgtggctgcttctgagccaacatcctggttgtctacgtatcttcacatcgttttccacttaacctgactttgggaccttagctgtagatctgggctgtttcccttttgacaatgacatttatctgacactgtctgactcccaagcatcaatactctggcattctgagtttgataagcttcgctaacctctcggccgctaggctattcagtgctttacctccaggtatctaacttaaggctagtcctaaaactatttcggggagaaccagctatctccgggttcgattggaatttctccgctacccacagttcatccgccgccttttcaacggaggtcggttcggtcctccatggaattttacttccacttcaacctgaccatgggtaggtcacccggtttcgggcccattgtatgcaacttaacgcccttttcaaactcgctttcgcttcggctccagaccttaagtccttaaccttgctgcatacaatcgctcgccggaccgttctacaaaaagtaccctatcacactttgacgtgctctaggtgcttgtaggcacagggtttcaggttctttttcactcccctcccggggtgcttttcacctttccttcacagtactatacgctatcggtcactgggtagtatttagggttggagggtggtccccccgtattccgaccaggtttcacgtgtctggccgtactctggatcctgcgcagctctctccgttttcacctacgtggttctcacactctctgaccggccttcccatgccgttcggttaacagattaagtcctaaaagcagtccgtaccccggaagtatttctactcccggtttgccctcttccgcgttcgctcgccactacttacggaatctcgtttgatgtctcttcctcgccctacttagatgtttcagttcaggcggttccctcgatatacctatttttaagttcagtataacgtacctgagtatgaacccaggtgagtttcctcattcagaaatctccggatcaatgcttatttgcagctccccgaagcttatcgcagcttatcacgtctttcatcggctcccagtgccaaggcattcgccctgcgcccttgttcgcttgacctttcaaacgttcttttggaacatttggtatcctcttgattctctcttgccaacgaagattattgttacccttccttttgaaattgtaatatttcttaaaaaagaacttactataatctttgtttcgcagttattattcagttttcaaggtacgtcttggtgatgtccctcaaagcccggtctcccggaactttgattttcatcacatggtgggccaaaatggactcgaaccatcgacctcacgattatcagtcgtgtgctctagccagctgagctattggcccatgtggtggagattaagggaatcgaacccttgaccccctgcttgcaaagcaggtgctctcccagctgagctaaacccccacataaggttttgagtaaccccttttcagggccctcaaaatcgaacaatatctacttaaactttaacttgtcacctgttccaatgactgatcatcttagatgcactgtcattgcctgactccttagaaaggaggtgatccagccgcaggttctcctacggctaccttgttacgacttcaccccaatcaccagttttaccttcggcggcgtcctccttgcggttagactaccgacttcgggtccccccggctctcatggtgtgacgggcggtgtgtacaaggcccgggaacgtattcaccgcagcatgctgatctgcgattactagcaattccgacttcgtgcaggcgagttgcagcctgcagtccgaactgggacgttgtttctgagttttgctccacctcgcggtcttgcttctctttgtttaacgccattgtagtacgtgtgtagcccaagtcataaagggcatgatgatttgacgtcatccccaccttcctccgttttgtcaacggcagtctggccagagtcctcttgcgtagtaactgaccataagggttgcgctcgttgcgggacttaacccaacatctcacgacacgagctgacgacaaccatgcaccacctgtctccttgctccgaagagaaatactgtttccagcatcgtcaagggatgtcaagacttggtaaggttcttcgcgttgcgtcgaattaaaccacatactccactgcttgtgcgggcccccgtcaattcctttgagtttcaaccttgcggtcgtactccccaggtggattacttattgtgttaactgcggcactgaaggggtcaatcctccaacacctagtaatcatcgtttacagtgtggactaccagggtatctaatcctgtttgctacccacactttcgagcctcagcgtcagttggtgcccagtaggccgccttcgccactggtgttcctcccgatatctacgcattccaccgctacaccgggaattccgcctacctctgcactactcaagaaaaacagttttgaaagcagttcatgggttgagcccatggatttcacttccaacttgtcttcccgcctgcgctccctttacacccagtaattccggacaacgcttgtgacctacgttttaccgcggctgctggcacgtagttagccgtcacttccttgttgagtaccgtcattatcttcctcaacaacaggagtttacaatccgaagaccttcttcctccacgcggcgtcgctgcatcagggtttcccccattgtgcaatattccccactgctgcctcccgtaggagtctgggccgtgtctcagtcccaatgtggccgttcaacctctcagtccggctaccgatcgtcgccttggtgggccattacctcaccaactagctaatcggacgcgaggccatctcaaagcggattgctccttttccctctgctcgatgccgagccgtgggcttatgcggtattagcagtcgtttccaactgttgtccccctctttgaggcaggttcctcacgcgttactcacccgttcgccactcgctcgagaaagcaagctctctctcgctcgttcgacttgcatgtgttaggcgcgccgccagcgttcgtcctgagccaggatcaaactctttataaatgatatttatcacttaaaagtgttaaatcttgtttcgctcagcacgcaatcgcttgcgtcctgtgtgaattactttgtttggaattgtttaccgtgtttttccaacacgaatataggttccgttacaagttctttcgatattgttcaattttcaaggtcctgtgcgccgcagccttgcggctgacagcttattcattttatcactttcgtgataaattgtcaagcacttttttgaaagatttttgagtttcattttcgattctgtcgaatctctccgtttgacgtcgtttttgaagtgtttcattctgtcggacgtccgcctgacagtaatgtattttagcacagcatccttcaaaaagcaagcacttttttacattttttacaccaaaatcattcttttgactttttgcccagttttttacatttattatagacacttcctcccttattcctccaaaagccgggtgcgcagtcggatcaggatcttgcgttcccgccgggagatctgcacctgagtcgtgtgcagtgcttttgcagtctcgctctgggtacggttgccataaaagcgcaggcgtatcagctgcttgtcctgctccggcagcgcttcgatcacctccgccagactgatcctatccgccagctcctcctccggtgattccaccgggatatccagctgccgatccccgtcctcgccattttccggggtcaggctcatggcgggctgcgcagcctgtatggcaagggctacattctctatcggttcatccagctgttctgccagctgctgcaaggtaggctctgagccgcacagcttcatggtatgctcccgtgctgcctgcacccgcattcccagctccttcagggagcggctcaccttgaccgtacctccatcccgaaacagctttttgatctcgccaaggatcaccggcacggcataggtggaaaagcacacgccccggctctcgtcaaaattatcgtaggccttgatcagtcccacgcaccctgcgctgtatagatcgtcatactccatgccgcgcccacggaatctgcccgcacaggcgtgcaccagccccagattctgtgtgatgaatgcttcccgccgggtcttatccgttaccatataccggaccgcctttcttttttatgtaggctcccgccgggacagacgcttgaccagcagcacctttgttcccttgccgggctttgaggtgaccttgaccctgtccataaagctttgcatcactgcaaagcccagaccggagcgttcctccgggttgccggtggtgaacaagggctgcatggcctgttccacattggggatgccgatgcccttatctgtaatggtgatgtgcacctcccggtctggatagaccgctatggtcatacacaccggcccgatccgctccgggtaggcgtggacgatgcagttggtcaccgcctcggacactgccgttttcaggtcggcaagctgtggcacggtggggtcgtaccgcgccagaaaggccgccgtgacgccgcgggcgtatgcctcgttgctgctgagggaatcgaactggatgcgggtactgttctctgctttcattgcgcattctccttttctatgttctccgtataagggatgcctgccagccgcagaactttttgcagctgcactggggcgtgctgcagccgcaggctcgtgcccagaacgcgggcgcagcgctgccgcccaaggatgagcccaacgccggaggaatccatgaaccccaccccgccaaggtctacgatcaaggtacgcggactgcggctgaccagtgcatcgtccagctgcatccgcaggctctgggcggcatcgtggtcgatctcgcccgccagataggcgtacagggtctcccctgccgcgctgaaggtcaccgttgccattgcttgtccatctccttttttgcaaaataaaagatcccgtacacatagcttcagtgtacgggatcttcgggttattttttagaaaaagctgtcggcggtttatgcctttgccagcagctcggcagcttccagcgctgccgcctcgctgccgcagaccagtaatccgcggcgggtgttggcgtgcgccagctgcaccgcctcgtccagactggtgcagagctgggcgtcaaagtgatactttgccttctcggtcagacgccgggtcagctgttcctccacaccggcgggcgtgacgagatacaccttatcaaaggggctctcgctcatgcctggcatggtggatttatcctttttctgttcctcggggctcaggccggtttccagcgcggagaagaaggcttcggcgccctcctcctcggtcaggccgatgatggcgctcatgtggcgcaccttagccatgttcagcacgcgcagcagcgcagccgcctgctgcggggtgcggcaggcatccagaatgaccagcgggcgctgagaaagcacccggatgctgcagcggttgtccacggcagcaatgccatccagaatcgcttcatcggagatgtctgctcccttgcggcagagcgccagtgccagctccaccgccatggcggcgttgcctgcggcgtgacgccccagaaaggccagcggcaccgtatagccgccgtagtccacccggctggcgaactgttctgcttccaaaaaggtgatatcctctgggtcgggcactaccagctcacagccgcacttgcccgcagcaacgatcagctcactgagcaccgccttgggctgttccggcgcggtgacgcagatgctgtccttgcgcatcacgccgcctgccagcgcagccagacgctccaccgagcgactcacgccgtccggccccaccgctgtgacagcacacaccggcatttggggcagtgccgcagccagacccgcgtccggcaactccaccaccgccagcgtgcagccggcttcgccaaagcagtacgcagcggcggcaagctccgccgcctgcataggcagttcctcatgggcggcaagagcatcggcggcgcggcacagcagtgtcccgtccaccggcttgcctgccacctggatacgggccgcaaggggctcgcacccagcatgatagacaccggcacgaatgccctgcgcgtgcaggatggccgtcagcaggcgcgccaccgccgttttaccggcagtgcctgccacgcccacgaactgcacctgctgcaccaaagtgggcagcagcgcgcccagctgcgccgggtcggcaaagccgtccggcagagctgcaaaatactgatttgcctgttggatggtcattcgtgtctccttttcatgtgataatacagcccctcgcaggccagcagcagcacgatggcgacaaggatgcctgccagaacaccggcagaatccagccacacatcggtgacctgactgctgcgcccctccgagaagagctgaatggtctcatcggtcagcgctgtcagcacaccgcccagcatgggcacggtgatatgccgcagcgggtgacggctgtacacccgcatacagagcatgagcagaaagccctccagcatatactcgcaaaagtgtgccagcttgcgcacgatgtgcatggtcaggcggtcagccagtcccggatgacccaagcggcgcaggataatgcgcatccatgccagcacccggccgctggagccggtggagactgttgccaccgccatggagttggaaaagatgaaccagatgcaggcaatcagtgcagcggtaaagatcacccgccccgcaatgacccacaacgaggtgcgctccgtatcgttatagcgttccacagtctcaacccagcgccttgatgctctgctcaatgttggccagcttgtcctgactcttggcgaactttgcgcggatttcctccaccagagccgccggggcacgctccacgaacttggggttgttcagctggttgccaaacatggccatttccttttcagccttggccttttccttgttcaggcgtgccagctccttctcgcggtcgatcagctccatcatggggataaagccgcgggcggcgtgggtggacacctgcaccatgccgtcggtgctgccctcgtacttttcggtaaaggtcacatcggtggcaaaggcgaacttagccagatagacctgtgcgttctggaagggggctgcatcggcagtttcgatgatcatgctggtctttttggcggggtgcacgttcatctcggtgcgcatggtacgcacagccttgatataatccatcaccttttcaaaggcttcctcctcggcggcccagttgtgagcggcgtcaaaggtgggccaagcctgggtcatgatggtctcggcagagccgggcagcgcctgatacagttcctcagtgatgaagggcatgaaggggtgcagcagcttgagtgccttatccagcacatacaccagcacgcggcgggcggtatctgcctgctgtgcgtcgccggagttcaggcggggctttgcgatttcgatgaaccagtcgcagtagacatcccagataaagctgttgatcttggcagcagccagacccatctcgtagtgctccagattgtcggtcatagcaccggccacctgattcagcttggtcagcacccacttgtcgctcatgtccagcagctcctcgctgggcagacccggctcaaagtcctcgggcaggttcatcagcacaaaacgggtggcgttccacagcttattggcaaagttgcgggcagcctccaccttcttttcgatatagcgcatatcgttgcccggggtagagccatccaccagcataaagcgcagggcgtctgcgccgtactgggcaatgacttccagcgggtcgatgccgttgccaaggctcttggacatcttgcggccctgactgtcgcggacgatgccgtggatgcagacggtgtcaaagggtgccttgccggtgtaggccagaccggagaagatcatgcggctgacccagaagccgatgatgtcgtagccggtgaccagcgtattggtggggtagaaatacttgaggtcggcgctgtcctcgttgggccagcccagcgtgctgaagggccacagggcagaagagaaccaggtatccagcgtgtcggggtcctgcgtcagctttgcgccgccgcacttggggcagctgcagggagcagactttgccaccacggtctcgccgcagtcatcgcagtaccaagccgggatctgatgaccccaccacagctggcggctgatgcaccagtcacgggtgttcttcatccagttcatatagttcttagtaaagcgctcgggcacaaacttgatctcgcccttctccacgctctcgatggcgggctttgccagcggctccatcttgacgaaccactgcttggagaccatgggctcgatggtggagtggcagcggtagcaggtgcctacctcatgcttgaggggctcgatctccttcaggaagccgccctccttcaggtcagccagaatggccttgcgggcttccagcgtggtcataccggcgtacttgccgcaatccagcacctgaggctcgttgacggtgttcttgccggcagcaaacagggcatcggctgcggccttgtcggcagcgccggtcatgtggccgtcgtaggtgaacacgcgcacgatgggcaggtcgtgacgcaggccgacctcaaagtcgttggggtcgtgggcgggggtgatcttcacgacaccggtgcccttggtcatatcggcgtgctcatcgcagacgatggggatttccttgttcagcaggggcagcaccacatggcagccgtgcagatgggcgtagcggggatcctcgccgttgatagccacagcagtatcgcccagcatagtctcggggcgggtggtagccagctccagcatctcgccggtctccttgaccgggtacagcagatgccagaagctgccgtccttctcctcgtactccacctcggcgtcggagatggaggtgttgcagtggggacaccagttgaccatgcggttgccgcggtagatcagccccttgtcgtacaaatgcacgaacacttccttgacagcctcagagcagccctcgtccatggtaaagcgctcgcgctcccagtcgcagctgctgcccagcttcttcagctggctgacaatgcggttgccgtacttggtcttccatgcccaggcgcgctccagaaaaccgtcgcggccgaccatttccttggtcagaccctcggcgcgcatggcctccaccaccttggcttcggtagcaatggaagcgtggtcggtgccgggcacccacagggcggcatagccctgcatccgcttggtacggatgaggatatcctgcatggtgttatccaccgcatgacccatgtgcagctgaccggtaacgttcggcggcggcatcacgatggtgtaaggtttcttgtccggatcggctttcgtgtggaagtagccgccatccagccagaactggtagatacgatcttccacctgactgggatcgtactgctttgcaagttctttcatagtgtcctcccaaaaaatttgatgaagtgggacgcaaaaagccgtcccacggagcgttccatgggacggctgtaatacataaccgcggtaccacccaaattgcgcggaaagctccgcgccccttgatgcccctgtaacgtagggcagacccgaaagcggcttaccggcaaggctcaccgcttctgctccaaagtgacagtgccccgccggtatcccgccgggttttcagctgcccccggctctctgtgcggtcccagacgatgcacactctttttcaacgcatttataaaaagaatatagcgttttttgtgggatttgtcaatcagtttttcaaacctttcacccaacgcaccagcttccatacctttgcgcccagatgtgggcagtaacccatcatcagcgcctgcagcttctggcttttgtgctccgacgggattttccacgcagcgtggcggtgcgtggaagccagctccagcagtgttttttccttttccgagtcccgctccggctggttgaccagccggaaatacacctcggcgcaggacatgatgcagcgctgatccgtagtgctgcggaaggggtccggctgctcctttgccagctgccagacccgttcccatgccagtgccgccgtataaaagcgcaggcttggcttctgccgcacggcagaatctggtcgttcaagataggcatacagcgggcagttcaaaaacgccagactgccagccttgagaaattccatcacaaaaaacagggtatcctccccataaagcaatgccggatcaaagcggatatcccgtaatatctcccggtgggtcagcatccgccagcagtgcccgccgctccattcccgcatccacgagtaattttctgccgtgatcctctgcggtgccgggcattctgtcactgtccacagggactggttttcctgtataccgcggtagcggcacatggacatccgggtaccgcagctgcacagggcatcgtacagccattccagatactgcggcagcacaaagtcgtcggaatccacaaagccgatgtattcgccccttgccacatccagcccaaaattgcgcgccgaggacaccccaccgttttctttgttgaaaatgcgcacccgggcatcctgcgccgcatagcgctgcatgatctgccagcagtcgtccggcgaaccatcgttcacaacgatcagctcaaaattccggtaggtctgcgccagcaggctgtccagacacgcgggcagatacttttccaccttatagaccggtacgatcaccgagatcagggggcttttttctgtattcatccggctctcctttttaaaatttccaacccacgccgcttcagcgcttcgtactccacgctgcgccggtagagcaatacgatcactcctgcaaacaccgccgtataaagcagcccgtccaaaacaaaaacgccaaaattgcccaccggaaagcgctttacccagagcatggctgccgccgagaccgccgccacgatcattgcacgcttcaggtactccgcaaaataaacccggagcttcttctgccatgcatcctgaacgccatacttcaaaaagatatagggctccacccagacacaggtgcacaggctgctgatgatggtacccccgataatgccgaccacgccgtaccgctgcaccagcgccagagagaccaccagattgatgatggactccgccacagccttatagcggtcgttccagaacagacccatgacctcccggaacaacaggttcgtctgccgcatccgcgagatatagaattctgtcacaatgatcgccacggtcgtcatcgggaaacagtattccctgccaaacagcagctcgatcaagggattgaacagcatcatcagcccgccagtcagataggcagactgcacaaaaaagagaaagtccatctctttatatacttggtacagccggtcagagttttccagcgccgcaaaattacccacgctgccggaaaaagccgtggcaaacttgttcagcaggttgttcagcgcgttgagtaccaaccggtaattggagtaaagccccaccgttgccagaccgatgaaggaggacatcagcaggctgtccgtgttgcgcacaatgacggtggccagcttgtgcatactcattgcgccgatgtttttcaggattccgttccgttcctccttttccggcagctcccggcattccttcagatagggaaattccttatccgccatgtgggagataatgatgttgggtatgaactgcaccacaagctggatggcaaggtacaggataaagttaccggtcagcaataatgccacgatctgcacgacggtgcggatgcactcgcataccagcgtccacccggtgcagatatagcttttctggtaggcctgataaatagagcttttatagttcagcaggtaagagcaggcagaggaaagcacatacatcatgtagatcaaggtgatatgctcgatgccctcgccgcccttgatgaggtacggcaaaaacggcagcagcaccagcccgaacagcagcaccgaagctgccaccgcccggtacatccacttataaaggttcatcagccgcgccagtttctgcgtgtcatcccgggcggccggctcgtacatactgaacaccatggccgtgccgatgcccagctccgcgaagttaaggatgctgagcacatcggtaaacagaccgttgacgcccagataggctgccgaaaggcagcggatgaacaccatccggctgatgaaggacagcagcatcgtcaaaaactgcccgccgatgttgaccagcatattgataagcgtatagcgtgttctcatgcgtttttctctttctcctcagcccttgagttcccgcagtcggctgtatgtctgcgggaagcgccacagcagccagctttgcagccaaagcccgcccgggacggtgcagtaccgccgggtgcggtcgaccacatcaaactgcatccgcagcatttcccggctgcggggtgccttgcgcagcgccaggggcagttgacggtatacccggctcacactgcccatcgtaaatcttgccgcatttgccagcgcatcgttcgcctcgttttccacaaggcagtcccaataccgctgtgcggcctcggcagcatcaaaatggcgcagtgttttgcttccgttcataatgctgctgccgcgctgcacataataatacagcgcctttggcaccaccacggccttctggatctgcaaacagattttcgggatcagaaaaagatcctcgttcagcttaccctccgggtagcgcagctgtgcaaagatagcgcggcggtacagcttgttccacgcaggctgcgccatcgtattcgtggctcttttcagcagttcccgcccggtaaagatccgctgtgcaagcccggtgtacggcggcagacagggcgcgcccgtctcgtccacctcggcgtaatcgcacagggcaagatccgccccggtgctttgcacagccttatacagtgcttcgtacatttccggcgcaatgtagtcatctgagtccacaaagccgatccattcgccccttgccacatccagcccggcgttgcgggcggcagaaagcccgccgtttttctggtggagcacccggatgcgggcatccttcgcggcggcggcatcgcacagcgcagggcaattatccggcgagccgtcctccacaaggatcagctcaaagtccgtaaaggtctgcgccagaatggaatcaatacattttggcagatagcgttccacatcgtacaccggcacgatgatgctgagcaatggtttttcgcagggcacagtgtgttcctccctattattttcaatccgtcacctcggtgcacaggcgggcaatgagccgctccatcagcgctacccggttaaaaggggtcatcaggtaaaagccgtccgcatagggcgcagccgccttggcggcctgcaccgagacttccaagcccagctcctcgcctgcggtacggtccagcccttcaaacttctggatgatggcttcgtccacatggatgccgttgacttcgttttccataaagatagcgttgcgctggctgaccaccggcaggatgcctgccagaatctttgcccgctcgcccaacgtctcgcgggtctttttcaggttttccactgcctgtgccgacagcactggctgggtgagaaagccgctcatgccgttttccagcttttctgcggcgcggcgcagctccacctcaaagttgcaggcgttcaggttcagcgccccgaacaccgtgatggggctgggcatctcccgcccttccccggccaacgaaacgatatactgcgccagcttgcgggagttgaactggtacacattcttcacctcgtcccgctcggcggtggggatggggtcgccggtaatggcaagcacctcccgcacgccctcggcatacagtcccagcagcagtgccttggtggcgttcaggttgcggtcccggcaggtcatgtggggcagcacgttcatgcccagctcccggtgcacccggcacgccaccagcgaggaatccatccgcgcccgggcaatggggcaatctgcaatggtcagcaggtcggcaccggcggcctgcaaacggcgggcaccctcgagataggccgtcaggtcggcatccttgggagaatccagctccaccgcaatggcccgctgtccggtgcgcagcttgcgcaagaaggcatcgtccgtttccactacaggctttgctactgcagcgggctttgccgccggggcggcgggcagcgcttccggcaaagcatccagcgcggtgtgcagggcagcaatatgctgcggcgtcgtgccgcagcagccgcccagaatgcgcacgccctcggcggcaaggcggctcagttcccgggcaaaatactccggcttgccctgatagcgcacctgtgcccgcgccaccaccgggtagcccgcattgggcatgaccgaaaggggcagtcccgcatctcccagctgctgcaccagtgcccgcatcgcacccggggcagacacgcagttcaaacctacggcatccaccacgccgctctgcgccatacggcgcacaagctcggcgcagtaacgaccctcgcgggtgtagccgtccggcagcaccgcaaaggataccagcacaaaggcctccggcacggtctgcttcagcgcacgaatcgcttccagcacaccttcctcggtgctcagggtctcgaacaggaaatttctcgcgcccagcagtgcaaagcgctttgctacggaaagatatacctgctccgccggtaggttctcggtgtccggcgcggggccaaggtcggcaaacaccgccgcgccggtctcccctgcagcctttgctgccagctgccagcccgcatccgccagctgctcccagcccggctgctgcgccgccgccagacgcggcaggctgaaggtattggtcttgatggcgtccgctccggcggcaagatacgcccggtgcaccgccagaatgccatccgggtcggtcaggtttgcctgctcgcactcctgccccggctttgctttataataggtacccatgccgccatcgaacagcagcggacgctgggctaacagtttgcgcacatctaacatcggtactttccctttcctataaaagatttcatctttcagtttatcgtagttcactcatccggtcaagcggttttctttatttcgcttgcggcgcggctgtttttgtgctatcttaaggtgtatctgaaaacaaagaaaatgacgaatatttcgcaaacacaagcgggatttaaggcaaatagccgcaggaatcctttgtggatttcaaggctctttaacgcaaaatccagctgtgtttgtagaaatagactaaattttcgacttttcagatacaccccaggaataagtttttataaaagggagaggatggatcatgcgtcacaccggcacacttgagctggaaactgaccgtctgctgctgcgccgcctgctgtcgcaggatgccccgcagatgtacgaaaactgggcaaacgacccggctgtgacccggtttttgcgctgggaaccgcacaaaagccctgccgagacccgggaactgctttcggcgtgggcagagctgtatccgaacccggattattaccagtgggccatagtggaaaaggccaccggacaggtgttcggctccatctccgtgtacaacgccctgctgggtgagccgcagcaaaagaccaaatggcagggactggagctttccggcggcatctgggagccgggctactgcatcgggcagaagtggtggggcaaaggctttaccaccgaagcgctgcaagctgtggtggatttctggttcagacaggtgggcggtgccttcctcacctgctgccacgcggtgcagaaccccgccagcggccgggtgatggaaaaggctggttttgtgtaccaccacaacgatgtttaccacaaatttgacggcacaccggtggaatgccggtgctaccttctgacaaaagaacgctatgataacagaaaggacttactttgagcgagctttatgatattttgaccgagacccctcccacaaaggtagtgctgctggcactggatcaggggctgtgggactgtgagcgcagtctggcagagctttctgccctgtgcgaggccaaccacatggaagccgtggcacagatcacccagaaacgccagaccccggagaccggcatcgtgctgggcagcggcaagctggaggaagcttcccttgccgcccagacgctgggcgcggaatgcgctgtgttcgacggcgagctgaccggcagccagatccgcaacatctccaatgcgctgggcggcttggaggtcatcgaccgcaccatgctgattttggaaattttccgcagccgcgccgtgaccaacgagggcaagctgcagaccgagctggcgctgctgcgctaccgtctgccccgcctgcagggcatgggcgaagcgctgagccgtcagggcggcggcggtggcggcggcggcggtgcccgccgcggtgccggtgagaccaagctggagctggatcgtcgtcatgtgcacgcccgtattgacgcgctggctgaaaagctggctgagatggaaaagcgccggggcgagagccgcaaggcccgcgccaagaccggaatgccggtggtaagccttgtgggctacaccaacgtgggaaaatccagcctgatgaacgccctgtgcggccccagcgtggccgaagccgatatgctgtttgccacactggaccccaccagccgcaagctggtgctgcccagcggcatggcggtgctgctggtggacacggtcggctttgtgtcccgcctgccccacaatctggtggaagccttcaaatccaccttggaggaagccgcatggtcggatgtgatcgtccgagtggcagatgccggggacgagcagcgcgaggagcagctgtctgtgaccgatgaggtgctggacgggctggactgtgccgacattccccgcctgaccgtgtacaacaagtgcgacaagcccaacaccctgagctttgaccccgatatcctgctgaccagcgccaagaccggctacgggctggacaagctgctgcaaaagctggacgaggtgctcagcgaccgggtgcacaccatccgggtgctgctgccctacgacaagctgggacttgccgcccccatgcgggagcgcggcagcgtgcaggcagaggaataccgggagaatgggctgtatctggaaggtatcgtcaagaccgaggatctgcactgctttgagggttatctggtctgagcggcaggcaattgctgatcatctcacattatagcaattcaactttttaatgcaacagcaacagcgttgaattgcatatcgcaaatatgctgtttgaatgttgcactaatttcttgtcttgcgaaaaaacaggcggctgcgcaaagtgctgtgcagccgcctgttttttcatttaaccaacattgatatgccccaccggcatgatcttgcgcttgttgtcgtccggtttggcggtcaggctcatggcaaaggccaccgggcccacacgacccatgaacatgaccagcatatacaggatctttgccccgttattcagctggctggtcacgcctacggaaagtcccaccgtgccaaaggccgagcaggactcgaagatggcatccaccaccgacaccgcgtccgaggtgttatagtacaccacgatggccgagccgatcgctgccgccgcgcccagcacgataatggtcagcgcacggtagaccgtcttagactcgatatgatggtcggcgatcacgcagtcgtcgcgcccctgcgccacgctgcggatggtcaggatgatgactgcgaaggtggtcaccttcacaccgccgccggtagagccgggcgctgcgccgatgaattgcagcacgctcatcagcagcttgctcaaggtaccgcaggaagccaagtccacggtgttcatgccggcggtacgggtggataccgactggaacagcgaagccatcaccttgccgggcaccgacagcccgcccagcgtggcggggttgttccactccatcagtcccagccccagcgcaccgcccagccacaggatcagcgagaaggacagcaccaccttggcgtgcagggacagacggcgtttttggtaccactggcacagctccacccagaccataaagcccagaccgccggagatgatcatgaatatgatcaccgcctgcacatagtagttgttgacatagggcaccagcgaggagtacgccccgaaccgtccgaacaggtcaaagcccgcattgcagaaggccgaaatggcggtgaacacgctgatccagacaccttccggcccgaactgcggcacaaaggcgaacatcagcagcagaatgccgatgccttcaaacatcgctgccagccccacaacgatcttcagcacgtttttggcctgatcgtagccgtctgccgagacgctctcgcccagtaagcgcaggtcccggaagcccatgcgccggcgcatggccagcgcaaaaaagctggtaagggtaacaaggccaaggccgcccacctgaatgagcagcagcaccaccgcctgcccgaaccacgtgaactgcgtccatgtatcccgcaccaccagaccggtgacgcaggtggcactggtggctgtgaacatggcattgagcacatccagccgtccgtgcctgctggaaatgggcagggtgagcagtagcgtgcccagcgcgatcacgataataaagctgacgcagatgatctgggtcggggtgctcagtcccagctttttccaccggagcgacctctgatgccgcagctttttgcggatatttttcattttttccatagcatcctccctgcgcagcacacagccgccttgcattcctttatagcatacaccattttgcccgcaggttcaacttgattttacaccccggttgcggtattataatatggtactgtattttgggcggctgtcctgtgcccccaaggatgcaggctcctgtctccgtagctcagctggatagagcgtccgcctcctaagaattcggtcaacctgataccttgggtgcggaagtgattgctctaatcaaaagcaaggctggggatcgagattttccaaacaaattttgatgcaacaactttaccatcgtcccggttgcaatgcagtcggtcacttcggtgtgaaaagcattccacacatttgtttccaagtgcgttgaatttcaaaaaatcaacgataatacataatatgcctcagtagcttagctggataaagcgcctccctcctaaggaggagaccgcaggttcgaatcctgtctggggtatccctttaagaaaatgcgaaggtcatttttccatgtgaaagacgatcttcgcatttttcattttgaacctatcaccaaaattagccagctaatgccattagcagaattttcagctccagctaataaaatcggctttccagctaatgaagcctcataaagcgccttttgaaccctgttttctggctctctgctaagattggtaaacgctttcctgtaaatccatgtaaatacaagataatctgtgtgaatctattttccacctttctgctggaagccgtgcaaaacacttttctccatacatagcgcgttcactcgctgttctctcggaacagaaagaggaacgcgcttttttgttttcgggccgaacttcccgaatccaccaaaggagggtttaccgatgaaaaaagttctgaccgtcacgatcgacggtatccgctaccatgcttcccgcccggcagattgccggcactgcttcttctggaagaatcgaaagaagggctgcgttctcggcaaagagaactgctactacctgatcgagccgcccaaaggccccagcaagtgcgaagggtgcccctacaagcgggcaaagccctgtgtgctggttccctgctacaaagacctgatggcaccgctggagaaacgaggtgatgccaagtgagccacaagcgaaacgaagctctgcgccatgttcagcactccatgcaccatgtgatcgccgctggcgaaggttccgaccgtgccccggacagttgcaagctgtgcccgtactatcgacccgatttcaagttccgcacctgcctgtatgcccactgcccttataggaagcaggtcaatgtattccgttccacacctgaaaaatgggatattctctatgcccgaaaaaaagccgacaagaaccgcagaccttgattacttctatggtcagtccagcgagctgttctccttctaccggattcccaagctgttgtttcaggatagccgcttccaaccgctttccacagatgccaaaacgctgtacggtatcctgctggaccgcatgagcctttcagcccggaatggttggttggacaaagctgggcgggtgttcatcatctatactgtgcaggaggtgcagaattcactgggctgtgccgataaaaaggccaccaagctgctgcgagaactggaagagtacggcctgattgaacgcaaacggagggggcagggcaagcccgacctcatctatgtaaagaatttttcgtcagaatcgtcaaaaacgccctacttgaatcgtgataatgacgattctggagtcgtccagaatacgcttcaagacccggccaaactacgatgtaataagactgagagaaataatacagagataagcgatactgatcctatctcttccgatgaaaacgactggatgagcgaacgtgaacaactggaggaatatttttctcaatctttggaggtagaccttctgctccggctttgcccggacgatgaggataccatctatcagattatggatttgctggtggacacctgtgctaccaaccgcaagctgctgcacattgccggggacgataagcccgccgaggtggtacgcagccggtttatgaagctgaacgctgaccatatccgctttgtgctgaagtgccttgcagagaacagcagcccgatccgtaacatgaaacaatatctgctcgcttctctgtacaacgcacccaccaccatgcagctttcctatcaaaaccaaaccaaccacgacttagcgatgaggaggcgatgaaaatttcaaagaaagcaaccacgattgccatcgtcaaccagaaaggcggcaccggcaagaccactacctgtgaaaacttaggcatcggactggcaatggaaggcaagaaagttctgttggtggacgctgacccgcagggcagcttgaccatcagcatgggctggcagcagcccgatgaactgcccaccactctttccaccctgatggcaaaagccatgaacgaccagagcattcaacccggcgagggtgttctgcaccatgcagaaggtgttgacctgattccggcaaacatcgaactggcagggatggaagtgtctctcgttaactgcatgaaccgggagaagatgctcaaacaggtgctggaaggcgcaaagcgcgactacgatttcattctgctggattgcaccccttcccttgggatgctgaccgtaaatgcactggcggcggcagacaccaccctgattccggtgcaggcgcagtacctgtctgcaaagggtctggagcagcttttgcagacggtgcagaaggtccggcggcagatcaaccccaagctgaaaatcgagggcatcctgctgactatgaccgacagccgcaccaactacggacagcagattgacaacctgattcgaggtgcttacggcagcaagatcaaggtgttcgaccagaccattccccggtctgtccgtgctgcggagatcagcgccgtaggcaagagcattttccagcacgaccccaaaggcaaggtggcagaagcctataaatctctgaccgaggaggtgatggcgaatgccgaaaggcagcttaaacgtgtcgctgaaaggggcagatgacattttctccacggaagaatcccgacaggagcagcaacgagagcaggtgcaacagatccccattggagagctgttccctttcaagaaccacccctttaaggtcttggatgatgagtccatgcagcgcacggtggaaagcgtagaacagtacggcgtgctttctccgctgattgcacgtccacgcccggaaggtggctacgagatcatctccgggcaccgccgtcagcacgctgcacagcttgctgggctggatgccctgcctgttatcgtccgtcagatggatgatgatgccgctgttttgctcatggtggacagcaatcttcagcgtgagaacatcctgcccagcgaaagggcttttgcctacaaaatgaagctggaagctctaaaaaatcaaggtgctaggtcggatttaacttcatcccaacttgggatgaagttgcaagcccttgatattgttggtcaggaaactggcgatagtcgaaatcaagtgcaccgattcatccgcctgaccagccttatcccggaactgctggacatggtagacgaaaagaaaattgcctttaatcccgctgtggagttgtcgtatctcgacacgaaccaacagcgggattttttagaagcgatgaacgacacccagaatgcaccgtccctttcccaagcgcagcggcttaaaaagctggcgcaggaagggcacttctcgtatgacgttgcctttgcggtcatgggagaagagaaaaaagacgagctggacaaggtggtcatcaaaaacgacaccctgcggaaatactttcctcgcagctacaccccgaaacagatggaggacactatcatcaagctgctggaacagtggcagcgcaaacagcagcggcagaacgaacgctgacttataccgtaacgcaagacccgatggggtctttttcttttgcaaacaaaaaggagaaacgcctatgaaaaacaacgctacctgtaccatccgctccgaggaaatcaccattgacgtgcgtatctgcgctgcactggcggcaaaccggggcggcgaggtctacctcgcagccattgccccggatatggagctgaccgtcatcacgctggacgaggctcccggcatcctgccctgctttgaggaggatgatgcttgcctgaatctccctgatacctcgctgctgctctgctacaacccggcgcaggtgctgaagatgggcggcaagcactacctgaccggtccggtgattctggtccgcaccaacatggacggcgaggtcatctcgctgaccatcgatgaggtctacctgttccagaagtatctggcaagccacagcatcaccctgatggcagacgaccagaagttgccctgcatctgcatcgactgaggtgccgctatgtcaacgagagcggaatttttccagaggatgtatccggggctgtccgctggtgaagtcattgatgaacttatcaaagccagcatatacggttttgaacacggcccggaggttgtgaccatcagtgccgcagagggcattcattatgtgccttacgatgcggaaatgcagaaaaagcttccgtattatggaggcacctacgaagtctgcaatattcctttaacggattttcagatccgctatcagccggagcagattcgcattgtggagggtaaacgcatcctggaggatacggcctttctctgtcggaaagataatgaccacttccttattctgccgagcgtttatgagaagctggatttggatgactggcttctggcacacctgtttttctacgacaaagacggaaaacggtgtatcggtgcggaactgtcggaggttgactgatgcgagttgtctttgagtttatgctgtttgaagccggcgcttttttcggcttctttgtggcagctctgttgaacgccgcccgtgctgggcaggaaatcactatcaaatttgaggaggaagataatggaacagaacgagaacactctgtcggtgctgaaaattacaccgggacagtatccgcagcaggtcgagatcgataatgacctgaaagccttgcagcaggcggtgggcggttccatcggcgcaagctacccttttgaagatccggttgccatcgtttataacgatgacggcaagctcatgggtctgccgctgaaccgtgccctgtgggacgaggacgggctgatgtacgatgtcattgccggaacctttctggtggtggggctgggcgaggaagattttgtgtcgctctccccggaactggcgcagaagtacgaagagcatttccatcagcccgaagcttttcttcctctgggacgccgcctgatggtcattccggtgccggacgaatcggttcagaatgacgcagaaaaggctgtgagcaagccgtccgtggaacatgaccgctaagacgattttctgcacaggaggtggtaacgatgcaggaagaaatcgagcataagacggtcaactttgccatctcgaccacaaaactgtctgctcgcaccctgctgcgcgggatgcagtttctgttacggcagtacgataagcacgcttcgcagggcaagcagtccatgaagcggctggtacggcagaaccgtggcgtgaccaatgtggaaatccagaaaaccggcatcaaggattttgaccgctatgctaagcggtatcacatcgactactccatccagaaagacctgtcctgcaagccgccccggtatctggtctacttcaaggcacaggatacagatgccttgagcgcagcgttcaaggaatattcggcatcggtgctggataaaaccaagcgtccttccgtgctggcaaagctgcatgatctggcgcagtccgttgcaaatctgccggacaaagtgcggcacaagcaggaggagcgcggcctatgagcaaaaagaagctttccaagctgttggcgctctatctgccctatgtggtaattggcttgctagccaccaatctgggcgaggcgtggcggctggctgtgggcaaggaacttggcgacaaaatcgtatcgctgatggatacgctcccggctgcatttgccaatccactgcccagcctgcacccatttgacttgttcattggtctgtgctgcggcgctggaatgcggctggcggtctacctgaaaggcaaaaacgccaagaagtaccgtcacggtatggagtacggctctgcccggtggggcgggcccaaagatattgagccgttcatggctccgaagtttgaggacaatatcatcctgaccaaaacggagcggctgatgatgtccaaccgcccacctgaccccaagaatgcccggaataaaaatgtgctggtggtgggcggttccggcagcggtaagacaaggttctttatcaagccgaatctgctgcaatgtgattccaagaattttccggtatcattcgtggttacagatccgaaaggtagtatcggcgtggaatgtggagaagccctgttaaagcacggctacaagctaaaattcttcaacacgatcaacttttccaagagtatgcactataaccctatggcgtacatccatagtgaaaaggatgtgctgaaactcgtgactgcactgatgaccaacaccaagggtgagggtcagggcggcgacccattctgggacaaagcggaacggcttttgctggtttcactgatcgcttaccttcactatgaagccccggttgaggagcaaaacttcgcaacactgttggaaatgttgaataccatgcaggtgtctgaggacgatgaaacttatcagaatccagttgacctactgtttgaggatctgggcaagaagaagccaaaatcctttgccgtgcggcagtacaaactttacaagctagctgccggcaaaacggccaagtcgatccttatttcctgcggtgcccggctcgcacccttcgacattcaggaagtccgggatgccaccatgtacgatgagctggaactggacaagctgggtgaccggaaaacggcgctgtttctcatcatgagcgataccgacagcacctttaacttcctgatctccatgatctacacccagcttttcaatctgctttgcgataaggcagatgaccaatacggcggcaaactgccagtccatgtgcggtgcctgatcgatgagtgtgctaacatcggtcagatcccgcagctggaaaagctggtggctaccatccgcagccgtgagatctcggcgtgtctggtcttgcagacccgcagccagctgaaagccatctacaaagataacgcggataccatcgtgggcaacatggacagccagattttcctcggcggcagcgaacccaccaccctgaaagatttgtctgaagcactagggaaagaaacaatcgacagctacaacaattccgacaccagaggaaactcaccatcttatggcacaaattaccagaaacttggtcatgaattattgagccgcgatgaaatagctgtgctggatggcggcaagtgcatcctgcagcttcgtggtgtgcgcccatttttgagcgacaagtacgacctgacccagcacccgaactacaagtacacctccgattatgaccccaagaacgccctcgatatcgagaagttcttgaaccgaaaagaaaaaatccacccggatgataccttcatcatggtggatgctgattcgcttccgcctgcctaatccggtaggcggttttgttttgtacaccagcaagcccacttccgccgcagtttacggcttaacaacaacggcttcaggtgtgtacggacggtctacaactttcatttataaaggagaaacgactatggaattctttaactctgctatcgaagttcttcagactctggttgtggctctgggtgccggtctcggcgtgtggggtgctgtcaacctgctggaaggttacggcggcgataacccctctgccaatgctcatgtacggtagagaagcacaagacatggatagccagccctgccactattccgaagtcaggggaacgcaatagaaaaattcatagctgtatgctatacttaattagcatttgaacatatcaagctgacacagcaatctctttgcttgccgttaatgtgcgtctaccaacagtccgcagaaagcaagagtagcgtaaaggtataaaaatttcaaacttctttgtaacgaaattccgatttctccgtctaacctatgaagctgaaggaggtgatgacaagtatggactatgaaaagctctataaagcctactatttacaggtatactcgtatactatttctcttgccaaaaatcgtgagatagcagaggaaatcacgcagaacacattctataaggctgtttctacaacatcacaattcaaaggtaagtcagatgaattgacatggctctgctccatagcaaaaaatctttaccatgatgaaatgcgaagccgtcagcgagtagctgatgtgagtgaaatcaatgacttgccatcaaatgaaaatgttgagaactcagttgcagattctgacatggcgttccgcatacacctcgttcttcaccgtttggaagaaccatacaaagaagtctttcagcttcgcgtattcggggaactatctttttcacaaatcgctgcaatttttggaaaaacagaatcatgggcgagagttacttatcatcgtgcaaagctaaaaattcaagaaaggatggatgaaaagcatgagtaaacaatgcgatattgttcgagatattcttccgctgtatgttgacggtgcttgcagcgaagcaagcgcagagatggtaaaagagcatttgaacgcctgtgctgattgtaacgcaatttatcagaaattgctttctcacacgagcgaagatgttcttcacgaagaaagcgaaagcgttattatgcgccatgaggcaaaagaaaagcagaggggcaggaaaaagataacgattgctgttctcgtttccatcgctctttgtaccattgcaatttttacagctctctttctgttacctataaacattgcttatgagcctgtcaaaatcgacttcccatttgaggttgaagatgtcgaaagcgttgaaatgtaccactatgacggagtgcctgcatcagcagaaaagaaagtagttgttgctgaaaatgatataaagaccctgtatgataagttcaaggacttatccttaaaagacaaaacaactgaggaaactgccggagcagatgtgaccagctttagatttaacctctcagatggaacaagctacgatttgatttacgcctgctatggagttaaaaacggcgaattgaagtcagaagcaggcggttttaagtatttcacaagtgcggatattggctcttattggaacaatttgaatacggaccttgaagcaattcctatcaatgagagtgaattgccgtgagcagatagcaaacccagccgagcctgtcaacggtcaagatgaacggcgcaaatgcgccgccgttgacagccccgcccgtctttgctgttcggtaatcaagagggcgacagcacaagatgctgccgccctctgccattattcagaaagggggattttccatgaccgaacacgaaaagtatcaagaacatatccggcatacacacgatgccttttgcaagactgttattcgccacgctgccatagacgcagcccggagcatacggagccgccgcaagcgggaaatctcgcttgaatatctgatagaagaaaaacactatccattcagtaccacagataaatactttgcggagcaatccggcatgaccagctatccgcttttcgtctgtggtcagatggtgcttttggaaagtccagagcttgccgcagccctgtccgcactatcacagatggaacaggaaatcattttcttgtactacttccaacgattgacgcatagggagattggacggagatatggacgggctggcaacacaaccgggcggcgtattcagatgattttacggcggctacgggcagagttggagggcttgtcctatgaaccagctacttccctatgaaacaatcgttaaggcaagcgagggcgacccggaagctgttgccgccgtcctatcccattatgccggatatatccgctcttgtgcgaaaatggacggacagatcaacacagatatgcaggaacatatcgtcgggcggctgatagaaagcctgttgaagttccgctttgaccgctaagcagaaaagttgtataattagagcctgacaaattaaactttaatgggggtggagcaaatggaacagattatcaattatagagacatacccacagataaaaggcttgacatattaaatgctcttgagcgaataggtttttttcctgcatacggcggtgtgaaaaccatgcaacaaattatggaaaagtcagttccgggttcaggtccacaattctatttcgttttccgtgaaaatgagttgatagggtacaattttctcattggtgacactaagaaatataaagcgttcccatggcttgctattagcaatatggatgagcagaagttggctgtttgcgaagaactgatgaaaatacaaattgctttttttgaagaactcggaatgcaaaagatagcagatcattgcgttaggattatggaagattacagaaaagggattggaaagcgaaaagaaagcgattgcagataaattccatttgaaaaacggctgacaatttaataccgccgcccatcacagcggcatataagcagtaaatcttgaaaaaggtttgctgctttttttgcgcctattttcaaaaatctttggcaaaccacaccgccggattgttgtagggagcaggacggggaaatcaaaaaaatttccgctgcatttgccaaaacgcacctttttcaccgttgtagtggtgaacagcgggcagaacacgccgccgcaatcgctatattggtggagcaagccagtatatccgcaaaccagagccgccgaggaaagcggcagttttttagagcaagattctaccacggtgccaaaatccgcatatctgcggttttgcccctttggtaaatcttgttggggagtgccttccccaaaccctgctcatgcgccctgtcgggcgagaaaggaggtcaacgcttgaagaaaaaatacaacacgccccaccgctgccatgtggtcaaaacccgcatgaccgaggaagaatacgccgactttaccgagcggctgaaacactatgacatgagccaagccgaatttatccggcaagccatcacacgggcgactattcgccccatcgttaccgtttccccggtcaacgatgaactgctgtccgccgttggcaggctgaccgccgaatacggaaaaatcggcggcaacctcaatcagatcgcccgcgtcctcaatgagtacggcacaccatacaacgccctgtccgttgaagtccgcgccgccatttctgaccttgccgccttgaagtttgaagtcttgcgaaaggtaggtgacgctgttggcaacattcaaacatatcagctctaaaaatgcggattatggcgcaaccgagcagtacctcacctttgaacatgatgagtttaccatgaagcccacccttgatgaaaacgggcggctcatgctccgggaggactaccgaatagcaacgctgaactgcggcggcgaggattttgccgttgcctgtatgcgctccaatctccgctatgggaaaaaccagaagcgggaagatgtgaaaagccaccactacattatcagctttgacccacgggacgcagcggacaacggcttgaccgtagaccgggcgcaggcgtttggcgaggaattttgccggaagcagtttcccggacaccaagccattgtctgcacccacccggacggacacaaccacagcggcaatatccatgtgcatatcgttatcaattctctgcggatagcggaagttccgtttctgccctacatggacagaccggcagacacccgcgccgggtgcaagcaccgctgcacagacgcggcgatggaatacttcaaagccgaagtcatggagatgtgccaccgggaggggctttaccaaatcgacctcttgaacggcagcaaggaacggataacggaacgggaatactgggcggcaaagaaagggcagcttgcccttgataaagagaacgccgccagagaagccgccggacagccagccaagcccacgaagtttgaaacagacaaggaaaaattgcggcaggccatacgcaccgcgctgtcctctgccacaagctatggcgagttcgccgccgttctcttgcaacagggcgtgactgtcaaggagagccgagggcggctatcctacctcacgccgaacaggacaaagcccattaccgcccgcaagctgggagatgattttgaccgcgctgccgttcttgcccttttggaacagaacgcccacagagccgccgagcagaccgcaaccgtacccgaatacccccgcaacataagggagcgtttgcagggcaaaaaagctgtccaaaccaccccggaaaaggacggtattcagcgcatggttgaccgggcagcgaagcgagcggagggaaagggcgcgggctatgaccgctgggcggcagtccacaatctgaaacaaatggcggctaccgttgccgcctacgggcagtacggctattcgccggaggagctggacgcagcccttgtatccgccaatgcggatttacaggacagcaccgccaagctgaaagccctggacgctgctatccgggagaaaaaggaacttcagacacaggcgcttgcctatgccaagaccaagcctgcccgtgacggtctgaaagcgcagaaaacggaaaaagcccgcagcgcctaccgggaacggcacgaaagcgattttatcatagcggacgcagccacccgttattttcgggcgcatggcgtttccaagctgccaagccataaagccctgcaagcggaaatcgagcagcttaccgccgaaaagaacgcccattacaacgaataccgggagaaaaaagcccgtgtcaaggagctgcataccgtgaaaagcaatctttctcaaatcctgcaaggcgagaaagacagagagaaaaagcacgaacatgagcgttaaaaaccgccccgaaacgataccaaaacggggatatgccctgcaccctatccgcaatactgcccacctttgaaacggggcgcacagcgcaggaaatccccgaaaatgacaccgagaaaccacatttttaccgacctatccgcttataccagcggaaacggcagaaaggagcgagaaatgccacgcatgagcaaaaagcggcggttggaatggagctttttcctcaaccaccgaaaccgtattacctacaatgacctttgccggagctgcacacgcggctgcaagcagagcttccgggcgattatcgtcctctgcccccggtatttctctaagagatggaaacacagggaggacaccgccaatggcagataaccgcaaatattactacctcaaactgaaagaaaacttcttcgacagcgattccattgtgctgttggaggacatgaaagacgggattttgtattccaatatcctcttgaagctgtacttaaaatcgctgaaaaatggcggcagattgcagcttgacgagcatatcccctataccgcccagatgatagccacgctgacccgtcaccaaatcgggacggtggaacgggcattagccatcttccagcagttagggcttgtggagcagcttgactgcgggttgctttatatgaccgacatcgagctgatgatcggtcaatcctctaccgaagcggaacggaaacgcgccgcaaggcttgaaaataaggcacttttgccgccgcggacaaatggcggacatttgtccgacattcgtccaccagagatagagataaagaaagagatagatatagagttagaaaaagagggagagttaaagggacaagccctcgcccgcagctatggcagatatgagaatgtatttctgactgatacggagctttccgaactgcaagcggagctgcccgaaaaatgggcgtactacattgatcggctttccggctatatcgcgtccacgggcaagaaatataaaaaccacgccgccactatccgcagatgggcggcagacgataccgcaaaggctgccccgaaacagggcatacccgaatacacctgcaaggagggcgagagcttatgagtaatctgtttacagaacgagttttgaatatggcggctgttaccccacagccggaggactacacgggcgaggacggactgctttactgcggcaagtgtcacactccgaaagaagcctacttcccggaaaagcaagccgccctgtttgggcgtgaccgccacccggcagaatgtgactgccagaaagcccagcgtttggagcgtgaagccgccgaacagcgcagaaagcaccttgacaccgtggaggacttgaaacgccggggatttaccaatcctaccatgcaggaatggacttttgccaacgacaacgggaaatgcccgcaaatggagattgcacacttctatgtggagcattgggaaatcatgcgcgaggaaaatatcggctatctgctatggggcaaggtcggcacaggaaaaagctattttgccgggtgtatcgctaatgccctcatggagcaggaagtcgctgtccgcatgacgaacttctctgcgattttgaatgacctgaccgccagctttgaggggcgcaacgagtatatcgagcgtctttgccgttttcctctgcttatcattgatgattttggaatggagcgcggcacagagtacggtttagaacaggtctacaatgtgattgacagccgctaccgcagccgcaagcccttaatcgttactaccaatctgacattggacagcctgcaaaatccgctggacaccgcccatgcccggatttatgaccgccttttggaaatgtgcgcccctatcctctttacgggagagaacttccgccgtgaaacggcgcaggccaagctgaacagactaaaagaattgatgaaatgaaaggagttgcctatggcagagaacaagcagaacaccaccccggaacgccgcccggactgcgtgacagagatccgcatgggcaacaccgtccttgtcgtttccggctttttcaaaaaagataccaccgacaccgcagccgataagatgatgaaagtgctggaggcggaagccgccgcaggacacaaagcccagctttcgccctaacgctacaagccgcacagtaaaaaatcgtcattttgacaggcggtaaagaagcagaagccactatacagacagccgccccatgtggtataatcgaaatacggaatagtggggctggctgtcggaaacggaggattttatgttaagacagaccacccagaaaatcactgccctttatccaagactatcccatgaggacgagctgcaaggcgaaagtaattccatttccaaccagaagcgtatccttgaaacctacgcaaagcagaacggcttttccaatctgcgctggtacacggacgatggctattctggtgcgaacttccaaagaccgggctttcaatccatgcttgcggacattgaagccgggaaagtggctaccgttatcgtaaaggatatgtcacggttagggcgaaactacctgcaggtgggaatgtataccgagatgattttcccacaaaaaggagtccgctttatcgccatcaacgatggagtagacagcgcacagggcgacaatgattttgcccctctgcggaacattttcaacgaatggctggtgagagatacgagtaagaaaatcaaagctgtaaaacggtcaaaaggcatgagcggcaagcctgttacgagcaaacccgtgtacggctacctcatggacgaggacgaaaacttcattattgacgaggaagccgcacccgtggtcaagcagatataccgtctgtgccttgccgggaacggtccgaccaagatagcccgtatgctgaccgagcaggaaatcccaacgccgggaacgctggaataccgcaggacgggcagcacacgccgctatcaccccggctatgagtgcaaatgggcgacaaataccgtggtgcatatccttgaaaaccgggagtacatgggctgtttggtgaacttcaagacggagaaaccgtcctacaagaccaagcacagcatagaaaatcccattgagaaacaggcaattttcgagaaccaccatgagcctatcatcgacacccagacatgggagcgtgtgcaggaattacgcaaacagcgcaagcgtccgaaccgctatgatgaagtgggcttgttctctggtatgctcttttgcgcggactgcggcagcgtcatgtatcagcagcgttaccagaccgataagcggaaacaggactgctatatctgcgggaactacaaaaagcgcacccatgactgcaccgcacattttatccgcaccgaccttttgactgcgggcgttctctccaatctacggaaagtgacgagctatgcggcaaagcatgaagcccggtttatgaagctgctgatcgagcagaacgaggacggcggcaaacgccggaacgccgccaagaaaaaggaactggaagctgccgaaaagcgtatcggtgaactttccgctattttcaagcggctgtatgaggacagcgtaggcggtcgcatttctgacgagcgtttcacggagctttcggcagactatgaagccgaacagcaggaattgaaagagcgtgttgccagaatacaggcggagctttctaaagcgcaggaagccaccgtaaacgcagaaaagtttatgaacattgtccgcaagcacatgaactttgaagaactgacccacaccctcttgcgtgagtttgtagagaaaatcgttgtgcatgagtgcagctatgacgagaacaagacccgtaggcaggacattgagatttattattcttttgttggcaaggtggacttgcccgaataaccgcccgacctgtccgacacaatgcgcaagtgccggataggaacggcaaaatttttacacttctactacttctttatcgaacatcagtaaagagtcagggcatgaagcagctcatggctggcggcggcgttgccctcatcggcatcaccctcattcctctgctgtctggtctgttcggctaagagccgcaggcgggtcttcccgcctgtacatatgatttaaccgggtgtgtcgctgatttcgctaagttcttcataatcatctggtgatgcggcacttcgcttgagataataatgtccaccatctacggaacacgcaccacaagaacaggtttcataatcatgtaccgatacggattcgataatatctccacattttttgcaacgaattttgtttctgattatcttcataaaataccttgccttattgttttcaaatcttcttacaacaagcatatcactttatctggcgttcatcaatcattatgttccatacggcggcttgagcagcaacggatagccctctgtggtttgcagttgtttgaatgtccgtgccccaagccgtgtttttatccacccatcaacgaaaggcggtgctttatgcagtttttgacccacattatttttctcctgaaccttctcaagacccttatcaaccacttcagctaaggacggtgactgaatggaaaccgttctcaaagcaatctcagattggatcaagtcgctgctgacagcggcgatcatgtccaatctctccggcctgtttgatgatgtgaacacccaagtgggcaacattgcacagcaggtcggcaccaaaccatccagttttgaaccgcgcgtttttgctatgatcgaagccctctcccggaatgtggtgctgcccattgcaggcgtgattttgaccttcattgcttgctatgaattgattcagatgattactgaacacaacaatatggcacagtttgaaccggcattgattttgaagtggatcttcaaaactgccatttcggtttggatgatctcgaatacgtttgacatcatcatggcggtgttcgacgtgactcagcaggtggtggcaaattccagcggcatcatcagcggcaacacacgggtgaacgacatcgggctttccatgctgcaatccagcatgatgcagatggacgtaggacccttgttcggactgttcttgcagtccttcttcatcggcatcactatgcgcatcctgtccattgtgattttcgtcatcgtctacggaagaatgattgagatatattgcatggtcagtcttgcgcccatccccatggcaacatggggcaaccacgagcaatcccatgtgggacagaactatcttcgttctctgttcgcgctgggatttcagggctttctgatcctgatttgcgtggcaatctacgcggttctgcttcagaatgttgccatatccggggatgccatcaactcgatctggagcatcgtggggtacacggtgctgctgtgctttacgctgttcaagactggttccgtcgcccggagcattctgggcgcacactgagggggtgaaaatttggcagcttatatttccgtgccgcgcgatttcagcaaggtgaagtccaaagtagccttcaatttgaccgcccggcagcttatctgttttggtgcagcggcagtcgtaggggtgccgctgttctttgttttgcgggatatcgctggcaatttcggtgctaccctcggcatgatggcggtcatgctgcccatgttctttctggccatgtatcagaagaacggtcagcccgccgaaaggatcctgcggtactactttcaggcgcgttttgttcgcccgaaggtgcgcccgtacaagacccgcaattactatgcactgcttatgaagggagatgacacccatgattccgtttctgaaaaagaataaggacggcaaaaagccgcccaagcccacggtgccccgcacggcacaggagagcatcccgttccagcgaatgtttgaggatggcacctgccgtgtccgttccggctactacacccgcaccatccagtatcaggatatcaactatcagttggcgcaacaggaggacaagaccgccatctttgaggaatggtgctcttttctcaactttttcgacagctctatccactttgagctgtcctttgtgaataccgccaccgattcggcagacttcgagaagtccatccgcattccgtaccagcaggatggctttgacgatgtgcgcgccgagtacagccagatgttgcggcagcagctttccaagggcaacaacggtctgaccaagaccaaattcctgacctacggcatcgagggcgacagcatggaacaggtcaaacctcggttggagcacatccagaacgacctgatgaacaactttcacaggttgggcgttctggcaaagccgctggacggcacggagcgcctgcggctgatgcacgggatgttgaacatggatggagccaacaagttccacttcaactggaaagaccttgtgcccagcggtctgtccgtaaaggatgccattgcccctactgcattggcatttaagaacagctgtacctttcagatgggcggcatcttcggggcggtcagcttcctgaacatcacagcctccgacctgagcgaccagttgctgaaggattttctggacatggattccagtcagattgtcaccatgcacatccagagcgttgaccagaacaaggccatcaaaaccatcaaacacaccatcaccgaactcgatagatcaaagatcgaggagcagaaaaaagctgtccgcgccggatacgacatggacgtgctgccgtctgatttggcgacttacggcagggatgccaaggcacttttgaaggaactgcagagccagaatgagagaatgtttttggtgacgttcctcgtgttgaacaccggaaaaaccgagcaggaactggaaaccaacgtgtttcaggcggtcagcattgcccagaagcacaactgcgaattatgccgccttgattttcagcaggagcaggggctgatgagcagcctgccactggcagactgtcagattgagatccagcgtggtctgaccaccagcagcacggcgatttttgtgccgtttaccacacaggaactgttcgacaacggcaaagaaagcttgtattatggcttgaatgctttgtccaacaatctgattatggttgaccgcaaaaagctgaagaaccccaacggtctgattctgggcacccccggctccggcaagtcgttcagcgcaaagcgtgaaatttgcaatgcattcctcgtgacagacgatgatattatcatctgcgacccggaagcagagtacgctccgctggtggagcgtctgcatgggcaggtcatccacatcagccctgccagcacccagtatatcaacccgatggacatcaacagcaactactcggaggaggacaacccgctggctttgaaagccgactttgtactgtccctgtgcgaactggtggtgggcggcaaggagggcttgcagccagtggaaaagacggtcattgaccgctgcgtccatgtgatctatcgcaagtatttcgagaatcccaccccggaaaatatgccgctgttggaagatctgtacaacgccctgctgacgcaagatgaaccggaggcccgccatgtggcggctgcgctggaaatctacgtcaagggcagtttgaacatttttaaccaccacaccaacgtggatatcaataaccgcattgtctgttttgacatcaagcagcttggcaagcagttgaagaaactcggtatgcttatcgtgcaggatgccgtgtgggggcgtgtgaccgccaaccgcagtgccggaaaatccacccggtactatgcagacgagttccatttgctcttgaaggaagagcagactgccgcttattctgtggagatttggaagcgtttccgtaagtggggcggcatcccgacagccctaacgcagaacgtcaaagacctgttggcaagccccgaagtatcgaatattttcgagaattcggactttgtgtatatgctcaatcaggccaacggagaccggcagattctcgcaaagcagctcaacatctcgccccaccagctttcctacgtcactcactccggcgagggcgaaggactgctgtttttcggtaatgtgatcctgccctttgtcgatcatttcccgaaagaccttgaactctaccgcatcctcacgaccaaactcaacgagatctcggagggcacacagaaatgagtaatccgaagctgaacatcaaagaggaatcgtccgcaaaaaagacccgttctcccccgaagaaacccaaggtggagcagtcggggcccagaaagaaaaagctgaaaaccgatgcagataaggctgcggaaagggcgcagcacctgcggtttggcaaagcggagatcaccccggatgaagcatcccgcatgacaaagcagcagaaacgtgctatgtatgccgctgctgccgcccgctctgcggtgcatcgggaggttgaccagtacgaggacgacaatgtgggcacacaggcgttaagcgagggcgaaaaagcggcaggaaatgtccgtgatatttccaagagcagatacgccagaaaactgaaaaagaaagccaagatgcagggcaagaagggtgccaaaatcgcaaaatctttcccgcaggagccgactgcggcacaagatgcaggcgcatcctgcaccggcgagggcggctccaactggctctcacgatggcggcagaaacaggatattcagaaaagctaccgtgccgcaacccggtcgggcggcaccgctgcacagaccgcaggcggtcagaaagctgcatctggtggtgttcctgctgcaaagtccggtatggagcaggtcatcgacaaaggaagatcggtggtcagcaccgcagtcaacggcattgccaattttgcaaagagcaacgcgcacgttcttttgatcgtgggcgtttttcttttgctcctgctgctggtcatgtcggcattttcgtcctgttccattctgttttccggcaccacgcaggtatccgggcagaccatttacaccgcagaggaccgggacatccggggagccgaaaccgactacaagaagctggaaaaggaactggataagaaaatcaagcgtacccccaccgaccaccccggctatgacgaataccgataccatctggatgctattgagcacgatccttggcagctcacttcgttcctgactactctctacgacgactacacccgcagcgaggtgcagacaaaactcaaggagacgtttgctaagcaatacaagctgaccacatgggtagaagtccagacccggtaccgcacggtagtgatgatcgacatttttactggcatcccctacaccgtgcaagtgccctatgagtaccgtatctttcacaccaagctggtgaataaagggctggaggtggtcatccgggaggaactggacaacgaccagtggaaacgctacgagatctttcaggacacgctgggtggtcggccatatctgttcaaaggtggactgccgcccggaggatcggatggctccggcacaccgggtattgattatcaggttccggcagaagccctgacagacgaggagtttgccgccatctacaaggaagcccaaaagtatgtgggtacgccctatgtgtggggcggctctaccccggaaacaggctttgactgttcgggctatgtctgctgggtctataaccaaaacggctacgatgtgggacgcaccaccgccaacggcctgtggaacaagagccagcacatttccgaagccgaagcaaagcccggagatttggtctttttcaaaggcacctacgacacccccggcatgagccataccgggatctatctaggcaatggcatgatggtcagtgccggagaccccatcaagtacgcaaacattcactcgtcctactggcagaaatacctgtccggttttggacggctttcaaaatgattggaggagttttatgagcgaaaaatcggataagctgcgggcgatgctggaaaaagaaaaggaacgccgcatcaagctgaacaaccgcatcgagattctggagcggcgcattcaggaagaggattccgccgaggtcaacgaaatggtgcggactgccaagctcacgccggagcagctcgccgctctgctgcggcagtcggctaccaccatcccgaacccggctgcgctgtctgccgtgggtgcaacttttgaggaggatgcagatgaagattaagaaactgggtgcgctgctggtatcggtggcactgtgcgctggcatggcggctcctgcttttgcctatggcggtgagcctgtggaggaagtggaacagcctgtcctgactgctgccaccgaagaggaagaggctgtcactgtgaccgatgaggagaccggtgccctgaccccggagggcaatctgacgctggtggacgattaccacaccgactattccgatggcagcggacagcagtttgttacgctggtcagcaaatcgggcaacacgttttatctggtcattgataggaacagcaaaggggcgcagaccgtccactttatgaaccttgtggatgaagccgacctgttgactctgatggaggaagaagatgcggatgcttataccgctgaaaaggaagcagcagaacaggacaagctgaaagccgaggaagaagccaagaaagccgccgaagaagcagcggcatccggcacggaaacgcccaaggaaaacaaggtcacaaagatcgcatctggctttctgggtgtggttgtgctgattgcactggcggcaggcggcagcttctacgctttcacaaagcggaagcagaaaaagcaggccgaaaaagaagccctcgaccccgatgcaaactacaccgaggacaagggcgattttgagattcctgtggaggacggaccggaggagaccggcgaggaggatgacacagaagaataattctattggcggcgtttgccgccgtacataactatcatttgtgtatttttcggaagcgcaatcattgtggccgaatgctatatatcgtatcaaattggtatggatctgattgtaaaacttttccatttgaaatcacgataattgtttcgccttctttaatttgcgatagttgaacttgccctttcaaataatctgatgctccatgaattatgtattcatcatcggcatcatacaactggttttttgctattgcatagatacagttctcttgcaaatccacatttgtgactgtgagcttcgattcttttctatctaaaaaattcactttgaaaaaaccaaaggaaaaaactactatcattgcagtgcaaatgctgaaaaccactttctttgtcattttatacacctccatttttttgcttccaataggagcttttgcttagtcaacgtaattcgccttatgtttgtgacagcttttttgaaaaaatctctgtttttcgttatgtttgtacgcttatacaaaaaatctccatgttatttgttgattctaacaaataacatggaggctcatattaaaaatgttttcagcgattctcgcaatctcatcttgtgagatgtttcccataatcgtgtttgaaatgcctctctgctcccagcttaaaatatatactgtatcgccgttcttttctacgctcgttcccaaagttgcgtctgcgtctccaacttttacgttctcataagttgtatgctcattgtcaaacgaggactgttgccccggctgtataatggagcatcgaacagtatatcctttgccgcttccttttgacgagtgaacgtgcaaaaagttttctgcgctttcaaattcctgctcacgatctcgttcaaagccgtccggcacataatgatcgctgtatccatccggcaatcgttccaacggttcgccgtccacttgatacgtcagctgcatctcaatcggcaagaacttctgaatcatcgtgtagactgccttgcggaagtccgcacttactgtaagcgcaccgagagttaaaattaccagcgtcagggccgcaataagcactcgtttcagcacagggcggcgtttatgcaacgccgcttgcaggcgggcatcccatcgggaagtgtccgggtagcgttctttaagctgcgccggagttggtagctcgttcagttctttctgtgcatctgcatggattgccatcatcaacgcagtgtcaaaagaaacttctgtctgctcactcatagtggttcaactccttccacaatagttttcttccacggaaaagccgcatccgaaccacttcgtccgtcagtccaagcgatttggcaatctcccggttggtgtagcccattgccaaaaggcgcagtgggtcacggtacatcggtttcatctgtccgatcagttctgtcaggtgttcgatgttgtcggcgctgactgctgcatcatccggcaccggggcaccatctggtgcgtccgatacttcttccagcagctcttctcgctgattgcgaagcatatcgtatgcacggcttctactacaactaacgagataagcggcaagttcgtgacagttttctcgatgaattttagaaaaatttttggcaacgtacaaaaacacttcttgcagtacgtcttctgccagatacgaatcgcccataattttgtaagcggtatgatagaccagccgcttgtaagtattatatacagctataaactgttcttcattgctttgatcgtcaagaacagctaagtacagagaaagcaacacaaccacctccaactgattcgcaacgattggatgtagtgtaccacgaaccaacaaaaatgtcgaatgtcactaatgttgtaaaggagcgtgatgccatgacccaaccaaaaactgacctcgcctatttccgtagcgaaaaagccaaagcagagcagaagctgcactaccgcagaagaagcccttgaccccgatgcaaactacaccgaggacaagggcgatttcgagattcccaccgaggacaagccggaggaacccggtgaggaagataccgaacccatctgatttcaaggcggcatttgccgccgtacatatccaaatgaaaacagattggagggaacgcttattttaattctagttgtagcagaaaagccctcggttgccatgtcctacgccaaagtcctcggtgccaccaaccgcaaagacggttatctggagggtaacggctatctggtaagctggtgcgttggtcatctggtggaacttgctccgcccaatgtctacgatgccaagtacgtcaagtggagtatcgcggatttgcccatcctgccgcaaaagtggcagtatctggtgtctgtgtccaccaaaaagcagtttggcattctgcaaaagctgatgcaccgcccggacgtggacagcattgtgaacagttgcgatgcagggtagtgcggttaggtgactcaagagaaagaaaaaagagacctcatctcgtcaaaaatcaaatttcaaaatcattaaaggagctattcaaatgaaacgaaatcagaatttcgaccataatcactctcaaaaactgctttccttccgctacaacatagacaccaaccgagtggaagcccggttcacggatggctctgccgtcgccaacaggatgcccaactgcctcagaacatcctcaacccgctactttacagtggggttgacacggaggattgagtgtcatcgttttttcatggctaccgccgaaaatcattgtaacgtattttgtgttacaaattggtcaagcgaatgattatgattaaaattctcttactcgcacaataagtcatttgataaactggttaaaatgccaaataatttcaaatcatagtccaacacacaacaaatgtggtataataacaatatatttaatgctttaactgtgtttgcaaaaaggaaaagaagataagtatggagattacatggttgaaaaatgaagataatgccattcaatacgtctatgcctctgctgttccccaaaaaataccattagacatttttaaagaaattgttcagagcagtaaagaaaactgtctacctgaattttatgtgatatctgaacagggaaagtatatcggatatattttattattggccgataaaaaagaagacatccctaaaccttttacatttcttgcatgtcataatggcgatactctgccaaaagaaactcacaaaaaaatattggaatttatcggcaaacggtgtcgtgtaaacaactggaataaactcgcttggttggccgaacaagaaatccagcaattgtgatatcatcgttttttaagctatctctctataaaaactccttaaagacataaaggcaaacttgaataaataaatttatctaaaagccccacctacaatagatattccaaatcgaagaatctactgcaggtggggcttgttctatgtgataagctattttgtaaaaatcaaatacgtagattatatggcagaatcatttggtgacactgaaagctaatgttgcgccatcaacgacactatacatatcgccgttagccgcagtagcaattccagtaaactcaacctcccattttcctttagagagtccatattttacatcttccgtaccgattgtgccgtatgcagaaatggcatgatcaaaggttccaaagggtgtaccaagtttattgaaatgcaggttaccttcaaaggaaacaattactgcacccggaacggtaatcgtccattggatatacccttcagacagataatcaagtgtacatgaaccagcatcgccccagaaggtttcgcgagaaattgggacaagtttgaatgttgcagagtttacagttgttcctttatcaatttcgatactagattttttggaagaaagtgctacaacgcctggttcaactgcaacagcagcaggcatcaaaactgtgttgaaaacaaccaacgcagcactcgttccagccattttaaggaattcatttcgggtcatctttttcatgtcgatttgctccttatattttattgactgttacaagtcacccagctacaatttggattctttttcgcttaattctgcactggaatcacctcttacaaaattttagtatattggcatcatcgtgatcaaaagcaatatcactaacagccacctcatcacactataaagccgcaaattttcaactcaggtgtatgctcatcggcaaataaatgtgaaccatacgaatgccgctgttaaacaacctgccaaaaccactaaaatacaacttgccaactttggctcaatagcaactttttgattttcgcacagcgcaaatttctgaagttcctgaaatgttgtttgattgacattgccgtgtattgctttccatgcaacgaaatgatttgtaatcagaagataatctgaaacgattcctacaaaaacaatggcaaaaaatgctgcggaaaagaaccacattccatcgcattgattcaccgtcaggatatcctgaaggcttgctggcttcaatgcccataaagccacaacatatagcaatacttcgcagaaatctctttggagtggccctttttgcttaaagaatcccattacatgttctccctgttctttgaagtcactatcagccaccaatggcctgataataatccgttttagaccgaatcaaagagccatttgacttatattccttgacagtttgatgatagcaatgtgtatagtagctattgtcatatgattgtttcctattaggaacgctgtaaatacaaggcttttcggagcctacgaaccacaaaaaataatatttgatctatcacattacacaaaaagccgtccggcgttcaaatcgggcggcttttttgcgtggatagaccggaaggaggcggaaaaataattacagaaatttaacccgcaaaattgtgcaactttcacgaaaaggaggatagtgaatggcagatgaaaaattgaacacaggccccggtgaggagaagctcccggaggctcccgctcctgttacggttgacgagccccaggctccggctcccgaacaaactgccgctcccacaccccagcaggaggggcctgcccagcccgagcccggtgatgtggtggtgtcctttgacaaaatcaatgagctgatgaatgaaaagcggcagacagcccgggccgaggtagaaaaagaggaggcggcaaaagagccgaaggagaaaacgcaggaggaacctcccaccgctggggatgatgaacctaaaaaggcccgtcggggccgtcccccaaaagaggaaaaagcggagcctgctggcaaggaggcggcgaagccccgcaagggccgcccacccaaggcggataaggcggcccccggcgaggccacgccgactaagcgagacaaattgtcccgaagtgggaaaaaggctgcggaggttaaagctgccccggaacccgaaaaggccccacccgaaaatgcggctccggccccggaacaggctccgcctgagccagccgctccgccccgtcctgtggaggaaggaaagctggtctatctgaagctttccgaaatgcatccgttccacacattccgcccccacccgtttaaggtgcgggacgatgccaaaatgcaggaaacggtagcgtccatcaaggcaaacggcgtaatggttcccggtcttgcccgcccggaaaaggatggcaagggttatgaaattgtggcaggccatcgccgccatcatggttgtgagctggccgggctggaggaaatgccctttatcgtccgggaaatgactgaccacgaggcggtacaggccatgaaggacagcaacaagcagagggatcagacgctccccagcgaactggccgccctgttggaactggaagtggaggacatcaagcaccagggcgggcggctgaaaaatgtggccgagggcgatattggaaaacgctccgttgagatcgtgggcgaggcgcacgacatgaactataaaaaggtcatgcgttatctgcggctgaactcccttgtgccggaactgctggacaaggtggacgataaaaaaatgggctttatgcccgctgtggagatttcctatatccgccccaaaaaccagcggctgatcgctgtttccattgacggagaacaggcatccccctctctggcccaggcgaaaaagctccgggagctggacaaggacgggaaactcaatggtgatgtcattgatggcatcttatcagaaaagaaaaaggaggatcgaggcgtgattatttctaccgctgaactggaaaagtattttggcaaggaagccactcccgccaaaatgaaggagcagatcatgactttgctggacgagtggaaagagaaacagccgcccgaactggcgaaggctccgaaaaagatggagcaggacaagtaaccacttcgagacattttgtcccgagggccctgccctccgcatcatggctctggtggtatatatcccccgtcgccgcctgttttttcgtacagccgggagcgggctgtcaagggtgcatcgcaccgccgttttacggcggcctgcccttgacggtctgccccggctgtgctatttccccggcaagcggcgggggtatatcctccagagccgccccctttcccatgattgggaaagggcggggggattgggctgaactttcttattaaaatatcggaggtattgactatgaagcgtccccttgcatacattaccgccgcatggttgagcggcgacagtgaaaacgcagaacaggccgcccgctactgccgggcggtttatgaggcaggcttttccccgatctgcccgcccctttatctgcccctgtttctcaatgacgcagtacccgaggagcataaaagcggcatcgacatgggccgtgacctgctccgccgctcccatgtgctggtggtctgcggccacaccatgaccgaggccatgaaaaatgatattgccgtggcccagcggctgggaattaccgccaccacccttgagggcatcctgaccgtcaagggacagggcaaacgctgatggagtctgtttttgaggctttcatttcaaatcctgccctttacagtgcggggcatccgctgcggtctgtacggcggcttccatcgtttcgtgaagctgtcttatttttgtttcaagctccttttgctcgttctggtacttctcggacagcatattgaagttatactcggttatgcgtccggcagaccagtcctcatacattttagcaaacagcccatcaacctcggctttacgcttctctgcctttttcagctccgcagcctgctttttctttgcagagtttctttccctgtcgctggcattgagcaggcgtttcagtagcttgtcctcgtctttctgtgccagcatagaccagtattgcagtcttgcaagtacataggcatacagtacatcatagcggatatagtgcatggaacactggcgtaatccctgtccgtttttgctgcaatggtagtacccgtatgggtttttgttctgcttgttttccccataggctaaagaccatccgcagtctgcacattttatcaatcctgcgaaaatctgtgtcgtaccgtttctgcgtttcctgcgtctgcttgcaatcagctcctgaactttttggaacacttcttcggaaatgatggcttcgtgggtattttccacacgataccattcttcctgcggcttccgcacctttttcttgttcttgaatgaaatgttgctctgcttgttgtgaacgctgtgaccgatgtaggtttcctctttcaaaatgctcttgacctgtgcaatcgtccacgcataggctttttctgcgggcacaccggcgtagatattagcgaaagtcccgtatctttcatagttcagccagccgggggtaggtactttttcttccaccagaatccgtgtaatgctggcggcacccctcccgtgtacggcaaggtcaaaaatcttctctacaatccagcgtgtttccgggtcgatcagaagatgaccttttttgtccgggtcttttacatagcccagcggtgcataggctccatagtgtgcgccattggcaaatcttgtgtgcatggcagccttgacctttttgctggtctgtcgggcgtgcatttcattcaggatgtttaagaacggtgcaagctcgctttctccgttgatggtgtccacattgtcattgatggcaatgtagcgtactcccttgctggggaaatagatttccgtgtactgaccggtcaggatatagtttcttcccagacgggataagtcctttgtgacaacgcagttgattttcccgtcttcgatgtcatcaatcatcctttggaaacttggacgctcgaaatttgtcccactccatccgtcgtcaatgtactcgtctacaacggtcagcccatgctctgcggcatactgtctaagcatcatgcgctgggtctggatactgccgctttccccctgtaattcatcgtcacggctcaatctcaaatatagtgcagtgttataaatcgttgtattgtatggttgtttcacggttaaaaatcctccttctaaaagaaacaacccacgcttatacaatactcgctggtacaagtatatcataagcgtgggctgattgacagtcgttattccgtattttttcaggaagcggcggcagcgtgctggatcacatcttccagcaggctgtcaagcggcttcccatcctgtgcgaaatgctccgataccttgatacggactttccccatgacaaaatactgggtgccgtctttttcggtaagcagggtgccgctgttttcgttgttgctctcgtttttgttttttgccataggcagttacctccataaatgaaatatgcccgacaagggaatgtcaggcaggtgtacagccgcagactgtctccgtgtcaaccaaaccgtgtcaaccggcagaaaagactttgaaaacaatccataggcgctctatgattactttttactttttctttgatttcttggttgacatggttgacaaaggagagaaatgccccaaatatcaggcttttctccgtcaactggctgtcaaccaaagcgtcaaccaaactgtcaaccggtggcttttcagaatggcagttccatttgccgggcttcttcttccgtgatttcctgaaaaccgtccccctccggcgggtcttggttgacacgctcccagcctttttgagaaccgtatttcttataccgcttcgggcttttgtaggctgcccagccctgaatgatgccgcccgcaatgccggtattcataatctcgcagattgcccgtgtctcccagtctgccggggaatttaagttccccagcgcttcctcataaagctgcttggagcataccctgtcaccggtgtagtcctccaaataggcgtagatcatgccagcctgtgtgtcctcctgcatgaagtcctgctgatgggcgttcaggtatcggttcatttctatgctgaatgacagcttatacttcccactgcggtaaaccgtcatggcttccgcccacatctgttcgatatacgccctcgccgccgcttcatcgtccagtatgtgaacctccgcccgttccgggtacaccgtcacggggagaaagcgccggttgccggtgcggtcacggggcaaaaagtcctgccggttggtcgtccctccaaatacacattgccgcagccggtctgccgggtgtgtctcatacggcaccttgtaggtttctttctggcggcttaagaatgacttgatttcctcaatactcttggcgttggctgtggcaatcatctccgacatctcgataatccaatgcccttgcagcttgcggtacacattttcatcgtccagcttcttcaaatcgtctgaaaaccattcgtccctgcctgccagcagccggaaaaaggtagatttcccggctccctgaccaccaaccagacagagcatgacctcaaacttgctccccggtctgaatacccgccggatggctcccatcaggaacagtttcaaggcttcataggtgtattcgtccgtatcggctcccagaaagtgatgcagggcgtaacggatgcgctctgtgccgtcccattgcaggctgttcaggtaatccctgactggatggtagcggttttcattggcaacaatcttgatggcgctctgcacctttttctcgctggtaagcccgtaattttcttccagatacaaaagcaggtagttcatgtccatgtcggtcagcgtggtactggtgcgctcccagcccagcggcttcacaatgtcaatctgctccgtcaaaaggttcaggcgcagcgccccgcgaaacagagggtcacgctggaacaccgtcaggcagtttcggatgctgttcttcacgccgcctttctgcgtcccctctaatgtttcccggatttctgccggtgtctgcgccggttccattgtgtccatcgtccttttgaccgcttcctgcgtttccggcggcaagctctgaaattcgctgttcaagccgcaacacctcctttccctgtgcggcgatcaatgccgctttttcttctatttctccgtataacaaaatatccaaaaggtattctgtgtagcttatcctctgcaacgcttccacaaaaagaggatgccagatggcatcctgcggctgtggggcgtgtgctgttttccaatgctccagcaggcgtagataatcgcatagcacccgtaaacaataccgttccgtttcctgaaatctctgctccgctgatttttgtcggggctgtgacctgttgtgacgcttcctatctggcgacgcattgccggatttctcataggatacgccgaagtcctccgcaagcctgaccgcagcttcccgtttccccaatccatacagcaaagcggcaaagtcgatcacatccccggaagccccgcaaccgaagcagtaaaagcggctgtccactttcatgctgggcgtgcggtcattgtggaatggacagcagaccatgccatttctccccacccggattccatagaatgaagcagcctgccgggtggtaacagactgtttcaccgcttcaaatacattcaaatgctccctccataaaaataccggtagcggtaaagctgccggttatatcatagctccatctcatgtttctttctctgtacttcctgtggctgctccctccggcgcagtgcggtatctacggcgttctgcacctgccgcagccgtatgacttcctcccggagtggcttgtgctgcggagacagttcggcatactctgtttttaactgtgcatattcctgtttccatgctttcagggcaatgggttttccgtccagtttttctttcagaatacggcgggcggcataaaacagccgtaactccgcatcgtgggatgtttcaaatttctccctctgtttcttaaacttgatattgttcaattccgtatggacaggttttagccgctggtaattctcgccctcccgtatcaattcctgcaattcctttatccgggcagatttctttttcatggagccgcttaatgcttcaaattcttcactgacagaggaaagacgctcctgcaaatcctctaatgtgagcagcttgttttccgtcagataattgacggcttcggcaaactgctttaagtttccggttctggctttattgctccatgcccctgcgttgcgctggttgtaataagcgatcagcaggtcggcaaggctcggtgtctgcggtttggaaagttcttcttttacctctgccatccagacaaacagggctttgatcttcttcctcacatcctgcatgagccggttggtggctttaatccagcggttcagttcccctttctcggtgcggatgccctttgcttccatctgccggacattagctccctcgtggacagtaggtatcaggtcaagcccctgccgcacataggaacggtggtcgatacgcacatccagccctttttcctcaaattttgtattaacggcagccgcccactgctcccgccagtgttccagcgtttccggctcatgccagtctgttgtatggacagcgttaaacatataatcgccatttttatcccggattcggtttccatcttcatcaagaagatattcccgccgctgtttttgtccccatgtgccatccgggttcaaagggcgcattgttgtcatcacatggaaatgcgggtttgggataccgccgtcctctttctccggactgtgaaaagcaagatcggcaatcatgccttttgccacaaactgctcctgcacgaacttcctcgccagctccatgttttcttccagcgtcaattcattctgcatggcaatatcaaaggaataggcaagctgtgcttttggatgtttctcgcagttctccacagcattccagagggtcgcccggtcaagatatatttccggcgcatggggcggcagcatgatttccgaagcgatcacgccgccctttttggtgtagtcgctgacttctccatagtagctgctgtaaaggcgctccccggctcggtaggctgcgctggcaatggcgctctgaccggcgctgcgctttatctgtgcgattgaaaaatgataaagtgctatccttagtcaccgcctttctcctgcccggaaatacgggcgtggttctctgtggcagaccggatgaaatgctccgcctgcggcagattcaaaatgctttccatgagggaataaaattccgtttcggtcagctcctttgtctgtggcgcaatgctctcaatagctgccccacgggtaatcagccggtgcgtcctctgtttccgggaaccgctttccagatacgcctgccggtttttcaaacgctgcattttccgtttttcccgttccagcaggacagtggttttttcatattcctgctttaactgttccaaagatttttccatgttctcacatcctttgcttataagataaagaaagaccatccgcagacagtctgtgtgtcagtgcttctataaaacccgatgaaaagggaaaaacgcagagcggatttctcttttcggcgggtacacaggggatagccgctttagcggcgcaagggggtgtagccaccttgtcggagcgaagcgaacgcagacctcggattgctgattttatcagcggcagaggtaagctccgcaggacgcacgatacatggtctttagactatgtatagaagtgcgcccttagttcctaagggattttgccgtttccggcagtcttgtcctttttcttggaacgcttggaaagatacttcgggcagtcaaccacaaccgcccggaagctctgtttacattcgtgctggcatttccggcacagttcgttgtaagtgatacggccgcggtcatttaagaagaaagaccattccaaccgccgcttgttactcattcttgccataaccggctcctttctccgtttctatctgatgtacgcagataggctgttttggtgtagcgtctcggtatcatttttaaggttttccctctgtatgcccctttggaaagtgcggcagtattgcagtcagggaatgatacctcacgcttatttgtcacttctcggtacggtttcggagccttttgccatccattcaaagaaagcaattttgctgaccttgataagtctgcccctgcggaacgctggaaagccgggtgtgtgtaccagctcataggcgctcgctcttgaaattcccataatccgctgaatgtccgccacatccagaaccagcggtaaatcctcgtagctgttcaatctctttttatcgttcattctgttcctcccataaatcaaataggttaaaatgcttcctgttgccgttctccccaaaagccgttttcctgccccattcctgcggtgtttccctgcattggtgcgccgaatgcgtcacttctcctgccggtcatatcccttttggacggtcattcacttgtcaaggtactgtgtggcacgaaattaccaactgcaatcatcatagcggactatccttgacaaaacaatacttctgcgataccatgagtgtaacggatataactaaattatataattaccataaacaaaggcaggggatagggatggagaatcagtttatacggcatgagccatgttttgagaggattttgtttgtcctgacgctggacaggaagaaaatgaaagagcggattttgattggggaagaacagcagatccgcttccgtctgaacgggagccaaaacacagaggtgctttgtgatatgacacgcccactgggaacttttttgataaactttgagcgtgacacggacagagactggaacttatacgggctttctccgctgcggcaagctctccactccaaccgctggaaacagccggagctggagcaggcggcaagcgaatttctttgggagaaatatcttagcaacgaccctctgaaaatgtatgtggcgttccgtatctggaacagctatctgcttgccagagaacctcgtgaccgtaacgctgcctgtgaccgcttcatggataaaatgagcagcctgaccggggtattccataacgaaaccatgatctttgacagagaaacaggaaaaccgaaacattttcaaactggcagcctttatttcaaaggcgcaccgtcagaagatacccggcttgacctctggttcccggacaaccggcgcacagaagaatgtgtgtctgcctatgcgtccctctaccccttgattacctattatctgaacaggctgaatgactgggggctttgcttccggcagtgcaaggtctgtgggaaatattttctggcaaagagccagcggtatgagttgtgcagcgataagtgccgaaaagcacaggcgcttcaaaacaagcgggaatttgacgagagggcaagagaaaataactatgacctgctttataaaaatgaatgccagaactggcgcaacaaaataaaccgagtaaaaaataccgcaggctttccggctgaccgtctggaaaaaatacaggttgccttttccgactttaagaaagaagccttgcagagaaaaaaggctgtaaaaacaggaacagccagcccgaaagaatttacggactggctgtatctgcaaagtaatgtaattgtggaactgacagaatactaaatttttttctcgttgtgaggtttctgtgacattttgctgatactataaaaagaaaaaggatgtgatactatgcgaatactggttgttgaagatgaccagcttttgaataagacattaagctataatctgtcggctgtcggatattccgtggatggggctatgtcaaaggctgttgccataagatttcttgaaaaacaggattatgatttaatcgttttggatgtcaatctgccagatgggaacgggtttgatatatgccgtgaggtaaaagaacgccgtcctgataccgccgtgatttttctaaccgcaaatgatatggaaagcgatatgctgaaaggatttgaattgggcgcagatgattatgtaacaaagccctttcctatcagcgtgttccaaaagaaagtatctgctttactgaaccgcatttcagcacaatccggcggagatttctacgatgatgggaatttgtatatcaatttttccgaattatcagcgtgtcttgcaggacagccgattacccttacatcattggaatatcgtttactaaaagtgctgacaagaaattctcaaactgtcctgacccggcaggtattgcttgaaaagctgtgggatatagatgaaaattatgtggatgaacacgcacttaccacaacgatcagccgcatccgcagtaaaattgaaacgaaccagcattcctacatcaaaaccgtttacggtatgggctatatgtggattggaggagcgcaaaaatgatttcaaaaaaactctccttaaataaagtctgcataatactggcaactaccattttacttttatccgtggtcatgttttcggttctatatatcctgacaaaagaaatgtctgtggtattttgtagcatggcgttctgtctgctttttctgctttgtgttactgtttttgtgatactgatacggcgaaagctgactttgttttctgaaatactttgctgcaccttagacgaaatgatgaatggaaaaatagatatatcacaggttgccgaagaagaaaacctattttataaaatcaatcatcggctggtgcgtctttatgaggttatgcaggaaagcaaaaacagcgttgccagtgaacgagctgacttacaggaattgatttccgatatttctcatcaggtaaagacaccgatagcaaacttaaaaatggtaaatgccaccttattagaacaagaagtgccatcggataaacagcgggaatttctgcttgccagtggcacacagcttgataaactggatttcttaatgcaggctatgataaaaacatcccggcttgaaacgggtgttatctcacttgaaaagaaacagcagcccatttatgatactcttgctatggctctgggtggtatctttctgaacgctgaaaggaagcacatacaagttgaagtaaactgcccggaaacattggttgtttcccatgaccgcaaatggacggcagaagccctatttaacatattggataatgcagttaagtacacgccggagtacggttctatccgtgtttgcgttgaaagctgggaaatgcacctgaaagtcagcatcactgataccggcaaaggtattcccgaaaaccaacagggagcaatttttaggcgcttttatcgggaagaaaatgtccacgatatagagggaatcggcattgggctgtatctcgcaagggaaattattagcttgcagaacggttatatacaagtaacttctcaagtaggaacaggctcaacattctccgtttttcttccccatgaataacctgtttttttgaaatgtcacaggattgtgacatttcagggcaatttattatgtcggctgtgacatttctgtgaggattgccctttataatgaagccatcacaagaaaggatggtgttctctatgagcattttagaaacaaaaaacttgaaaaaatactatggcaccgagccgaatatcacaaaagctctggatggtgtaactctcactgtcgaacagggagaatttgttgccattgtgggaacttccggcagcggaaaatccacattgctcaatatgatggggggcttggatgttcccacttccggtaatgtaaaggtcaagggaaaagatttgtcagggctgaacgatgaacagcttacgattttccgcagacgcaatatcggttttattttccagaactataaccttgttcccgttctcaatgtatatgaaaacattgttttgcccgtagaattggatggcgatacagtagataaaaatttcatggacgaagttgtgcaaatgctggcactcggcgataagctgcaaaatatgccgaacaacttatccggcggtcagcaacagcgtgtagcgattgctcgcgcccttgtctcaaagcctgccattatattagccgatgaaccaacgggcaatcttgacagtaaaacaagcagcgatgtattgggactgttgaaagtaacaagccagaaatttcatcaaacgattgtgatgattacccacaatagcgagatcgcccagcttgcagaccgtattgtccgcattgaggacgggaaaattgcagaataaggggggcaaaaactatgaatgatattttatttggaaatagcaatcgccctgttatcaaaaaattatccaaccgttatttcaaagcaggaaagagtagaaatatcattgcaattattgcaatcgctctaactactatactctttacaaccatttttacattaggctctggtttgatagataccgttcacgaccaaaatatcagaaaacaaggtggcgacggtcaagcggttttgaattatataagcgatgaggtttttgataatataaaaggcaatgagatgattgaacagattgcctatacaaaggcagtgtcttatcatatcaataatcccggactggaaaaatggcgtgctgatatgtggtttatggacgatactgctttgaagtttgcacggtatgagccaacaacgggacaccgtcctgaagcagagaatgaaattatggctgataccaaaacgctggacgcacttggtattcctgctgaaatcggagcaaccgtaactttggactatcaaattaaagggatttcatattcaaagaattttgtactatgcggattttgggaaacagacagcctaagtaatattggacgacttattgtttctaaagcctttgttgacaataattctgaacttttaacatacacctatcccgaagataatgactattccggcgtagtcgccgcttatgttatgtttcatggaaacggagctatcgaatcaaaattacatcagcttcttgctgaaacgggctatacttgtgatactatgggcggaagtccatcagatgacaattatgtgatcgctcgtgttagtcctgcatatcaaggcagtaactttttagaaaatccagctttattgatttcggggattgttggcatacttttaattatgataacagggtatttgattatatataatattttccaaatctctgtcattcaagatattcaatcctacggacagcttaaaactttaggcacaacaaaacgacaaataaagaaacttatcagcaaacaggctatgttactttcctttatcggtattccattcggcttgctaattggtttctttgttggacgagcattagtaccatttttaatgaacggcacagtttatgcttcggacgcaggagtaaaagtaactgctaatccaattatttttatcggagctgctttatttgcacttgttacagtgattattagcgtaaataagcctgccaaaatagcaggttcagtatcgcctattgaagcaatccgctataccgaaaatgacgcaacagcatttcaaggcaaaaagacgtctaataaaaagtctatacatggagccaaaattcatcgcatggcattatcaaatcttggtcggaacaagaaacgtacaattttggttattatttctatgactttgagtttggtattgttcaacactgtattcacacttgcaagcggctttgatgtggaaaaatatgtagagaaatttgtaaacaaggatttcatcatctctactgcggattacttcaattttaagtttggaaatagcgacagcaaaaatgacctttccacttcttttattgaagcagttaagcaaaatccggcatttgatgagggtggcgagttatatactacaaagattttggaagaagcattttctgtcgagaatggagttacctcaaattataacaaagacgctgagggaaatcctttggttcaattatatggagcagatgattttttactgaactcaatggatgttatagagggaacgattgattgggaagcattaaaatccgggaactatgtactgtatgccctgaccgctgatgacaatggaaacattattgatgaccctaatattcatgttggcgatacacttcacttcaatcatgtacaaatgaacggactttccagtagtatagataataactttgactgcaaggttatggcaaaggtgctaatcaatgaaaacaccgatacgataagaagtaccggatttgcaaagttctatatgccgacggatgttttcttacctctttgcgagcaacctcatttggttagcttcccattcaatgtagttgacggtatggaagctgatatggaggaatttttgagcagctatgttgaggacattgagccgagtatgaattacgactctaaacaaacgtatatcaattcctttaatgatttaacctctctgattattaccatagggggagcgttaagcattatcattggcttaataggaattacaaattttgtaaactctgttcttaccagcattattacacgaagaaaagaacttgccatgcttcaaagtattggtatgacaggaaaacagctaaagaaaatgctgtcatttgagggcttatactatgctgcgggaacagttgttgcgtcaatcgtatttggttctctggtatcggttatcattgtaagagcaatttcaaatagcatttggtttttcacttataaatttgttattttccctatgtttgttatctatccatttttgattgcgctaacggttattattccggcaatcatatatcgaaagatcgcaaaaacaagtattatagaacggcttcatcaaaactaaataatatagaaaagctggaagcaaaattaagtctgcttccagcttttttgtatttgctattgtatgtggttgactaaggaatattgtttaagcgtgagtttgtgatattgggtgtggtatctttaactatgggaaactcctttttcccatttgctgattcctttatcactgacatcgacgccatagtgacggagaagttcagagaaagctacaagtgaataaccattcctttttcgtgtgcctgcgagaatctgaccaacctcattgctatccctcgcagcgactgcatcatagcgcactgtggatggggctatgtgcatttttgtgagcgtggttttctttttcataacaagaacactcctttgtgatccgatagccctattatagtatagaaaatacaggaaatcaataagaaatctctaaaatagcgacaaatgcgtaattgatatctccaaaaagtgggtgtataatcgaatcaaatccacgaataacagccttttggtgttaatttgggacaggaaatgtgtttattcggtgtttttgagaggcgatactatgagaaaagaaaatgtaagatgcccgatgtgtggaactatgaactacgatgtggatcttgatgaaaccggtggctggacaaaatgccgtctgtgcaaagcagtgacctgctctatggaagagtggaaaaaacatacagtgtccgttccggtgttgagcgaaaagcagctcgtggcacgcagtatgattcgcaagtaatgcacgcggtgttctgatagatctgcaaaaaaggaggatttctgatgtgtggtgattacaaccttcgccgtgagaaaagatacgtcggagtggatgttcgttttactcctgacggcaagatccgtcctcttgccataaactatgacaagactcgcacttatggaattgatcgtgtcttggcagtcaagcacggtacatcacgttttggcgtgaaagggcattgcttcacctgcctgatttgcgggcagaagcggaatctttggcttgaaaagggcaagtggttcgtggaagcctactgtgccacatcagaaggtagggcttcataatggcaagatacttatcgcgtgcagaactctcgtgcatagcaggcaaatatattgaaatgtactatgcactcttcggaataagcaaaaatgaccccgctcctattaacccagagcagtttgcaaattctgttcttggactgaacctaaagatgttgccgctgtgtagcgatggtcacatccttggattaacggttttccagagatgtagcttcacagcaacccttgaggatggaacaaagcttgttgaagtatttatgccgagggatatcgtaatcgattctgctcttgcggcagacagatgcactggatgccggaatttcacaatagcgcatgaagcagcacatcagattttggctgatctgtttccgaacgactacggaaaagcagtcaagtgccgtgggcacattgcctatcgggagagaaacggaaagccctcgtgggaagaatggcaggcggatacccttgcagcagagctgctgatgccaacatttctgatcaatgccgaaatagaacgtgtagcgttgactctgccaaatgggattctgtacaaatcagtgtctgaccctaactatgaaaaaattctggagatggctcgacggattggggtttcttggtctgcaatcaggatcagactgcagcagatgcaggttataaaaggcaaacccatccactgccatccattggacatcatgcgatttggagaatgaatatgattcagttaaagaaccgtccctttgccggtaaagcaccgactactacacagcaggcagaatttagcataggctggagattttgccctgtttgtggaaataagttataccaaaaaatcgaggggtgttcaggtatactacaagtgaagtgcaatagatgcaaagaaaccctgagacttgatctggcatttagatgccggtgattttccagtcattttaacaaatacgggtgcattgcaccctgaatatggactgttcgctccgagcaacgggccattgccgcaaggcaatgtatgaaacgtgctccaaatagccgggcaacagctgattgagagattttctttgaagatccctcagttggttgttgtccggctatttttttagccttcaggaagcctgctcccgtaaaaaggagcaggctttatgtttgtccgtttttcgtggatgccccaagcggctagatatccgtagcaactccgagttttcgacttctcacgctttatcgaaaatttggaggtcacacatgagttttgatccgaatgctattggtaaccgtatttttactttgcgtacaaatgcgaagttatcgcaggaaaaacttgctgaaaaacttggtgtttcccatcgacacctcggcgatcttgaaaggggaagctccaatggctctgtaaaaatcctgatcgatattgcagaatacttccatgtcagtatggattatcttcttttgggccgagatccttctagggatcagtttcaaaatgaactgcaagccgctatagatcatcttgaaaaaatcaaaggtcttttataatcacttcaacaagaaacgctcctgccagttttacaccggcaagagcgtttcttgtgttattcaaaaatatcggcaagggcaagcagctgtacttctccgcgttcctgtgcctgaagtagtccgtccgtaaatccgcctttcgagaaaatgtagtagtggtagtttgttccctccccaaagtgtatttatcgaatttatatactcgtaagttagtttcttacgagtataatacttcatttcttacataaagtcaggaaatatatttttgacggctcatcgagaaacaggaacgatacttcctattttcctcaaaaattgtgaactctgagttcctgttcatttcgttccgcatcggttacaatacagccatagcttcggcaagcgttcaaagcagccctcaagctatcccgccccttgaaaattgaacaagcattcttcagtcacgttcctgtgatgatgagccacgtccgtaacaaatgcgatgatctcccactgagggaatgagcggtaggttgacggtaaatggatgacagcttctccatagctaagagccatcacagaataatgatacttctgccttcgggcagctcggtgagaaccacggagaggtgagaaccctatggattcggtacgctgccggacggctgaaagatttcccacacgaaaacagagttttcggtttccggggatgtcggggacaaatacggaaaggtatagaactataaatcacagcaatttgctgttcgagatagtagggtgggctgtgcgagcagcccactgttacatatacggatagaaaggagaaatccaaattggccacacgaggtaaaaaagagaaagagtatccgcctatgcccgcaaactggatgtacaagcgcggggatgtctacatgatggatctgaatccttacagcggttccgagcaaggcggcatccgacctgccattgttgtccaaaacgatgacggtaatttttattccaatgttcttctggtcgttccgctgacaacacagatcaaaaagcgaaatatgccaacgcattttattctgcacaatcgttttttgagtgcgccatctatggcgatttgcgaaagcccgcgccctgcagataaatccagagtgttaagctaccttgggcacctgtccaaatatgaaatgcggcaagtgtcagtgtgtctgcaatacagctttggtttcattggatacaagtcattccgaaaataccttacggctcctccgcaggaggatgttctcgccgctgcaaaagagctgctctccaagcagtttcagaatcttcgggtgctgaacagtcagccccctgctctcaccaagcacacaaaaggcgatttacatagcattgagcagatatcggaaaggatgctctccaccccgacagaatcttctgttgagttcatggtcgcagaactggatgatgcacttcaatcgcttatgttccgctggaatatctgttatgaacggtattccagttttcacttatccgataacgaaaagaagaaaatcggtttgattatccaatcaggaattgattttctgcaaaagaagaaggaggttcctttatgatgaacgcagttgtaaaaccttaccatgagatgtgcctgaacagcagcgaactgatcgtgccgcgcgacacttatcagcgtgctcttcaccccgctcgtgttgcccgcatcgcaaaagaatttgacgagcgggttgccaatgagccgaagatcagcttccgggatggtcactactatgtgatggacggacagaacaccatcgctgcacggaaatttctgaacggcggcgaagatttgcagattcgctgcaaggtttattttggtatgacagaacgagaagaagccctcctgtttgcacagcagacaggcatttcggaacggctgagtgcaggacagaagctccgtgccctgatttttgcaggggagcctgctgccgttgcattccagcaggccaccgaattggctggcgttcatctttcttttgaagaaggccgaggcaagcagcggatcagctgcattgcaaccgcctatcatgaattcatccggctgggtccggaactgtatatcgaatcccttgatgttttgctgaatgcgtggaacggagaacccgattccatgagttccgcaaacctgctcggcatttgccgctttgtagaactgtatcactccgaatacaacaaaggccgtctgattgccaaactgcggcaggtcgatgcattcacgatttttcgccttgcacgaaccgcaggcgtaagccttcccggcaagacgaagtaccttcagcaggtctatactatttataatggtggcagccgccgggctgcattgccgctcaagttttaactttaagtatatttaacgaggtattatccaatgattatccatgaagaaccttcgcccaactcggtttcctcccctgtttccacagcaaaggacagccgctgctataccgtagaagacctgatggaaatgctgctcctgagccgtcccactgtctaccgtctactgaagcagaacgaattccgctggttcaaggtaagcggcgcttaccgtatttccaaagccagctttgaagcatggctcaatgatggcactgttgaacgcaatcctgctgtttgacatcctcaacatttcacgcgaaatctgctattctttagccgagatgagaaatcccggctaaacttttacatagatagagaggtgtctttcatggatgatatgcggaatacttcggctcccttatacggaaaagctgaacctgccactaccaaaaccaccatgtcggttcgtgagatgcggcagcttctcggccttggcaaaacagacagctattggctgcttcataagaatctctttgaagtcattctgataaacgacaaaaggcgtatcgttatttccagctttgagaaatggtatgccaatcaggtcaaatatcataaggtcaatggttcgccaccgggcgaggaactttgcaaacggtcctattccgttcctgacgccgccgagatattgaaggtgaaacccgaaacgatctatacactcatccgacagggcaagttgaaaacagaaacggcagacttctgtatgagaattcccaaagaggactttgagcggtggtaccgatcacaaagtcgctaccgcacagcagccgaccgtgagcgtgaccgggagattgaagcgcaaaccatctccatcccggaaatggcaaaactactcggtatcccacgcaagaatgtttatgggattcttgattgcaaaaaataccgagattgtttcgtcattgagcgcgtggccgacaggccgcgcattaccaaaaaaagttttaaggcatggcttaaaagccaatctacataccaacttcaaaaaccgaaaaaagaaacgcatgaggagccgccgctaaaactgcaatgtcccaagaatgggaaatactacagttttcaggaaattcaggctttttacggaatcagccgcccaacacttgactcgtgggttctcaaagaaggaattccaacgatgaagttgggaagggtaaaacgcatccaaaaagatgctttcgatgaagttctgaagtccaaacgtaaagtagaggaggatgtataatggctagcattgtcaaacgcaataaccgatactgcgttgtctatacctacaaacacactaatggaacgctaaagcagaaatgggaaacctttaccgaccttgcagatgccaaaaaccgtaagaaagaggtcgaatacaaagaatccgtcggtacctttgtggcaccccagtgccgaactctaaaagacctgcttaaagaatacgtcaccctgtacggaagaaccaaatgggcactttcaacctatcaatcaaacactgcactgatttcaaactacatagaaccgcttatcggctcaatgaagctgcaagatctcaccacccgcgtaattgagggatattatcagcggctgcttaaatacgaagccgttgaccctatgtgtggaaagcgtcagcatcaatacgtttctcccggcacagttcgttcggttcacaaaattttgagaagtgcctttgagcaggccgtaaagtgggaacttatggaaaagaatccctgtatttatgccaccttgcccaaatacactgcaaagaagcgtgatatctggactgccgagaccctgttccatgccttagaagtctgtgatgatccacggctccggctttgcatcaacctctccttctcttgttccctgcgcttaggggaattgctcggtctgacatgggattgtgtggatatctcccccgaaagcattgaagccgggcgagcctccatttacataaataaggaattgcagcgtgtagatattgcttcgctgaacgccttggaaaataaaaatgtcatcactcgttttccctcgctgagttcccgctgcaccacggtccaggttctgaaaagccctaaaacagacagcagtatccgaaccatttttctccccaaaacagttgctgaaatgcttgtccactataaagccgagcaggacatgacaaaggacgcactgggtgcagagtatgcagactataatctcgtggttgccggcccgctgggaatgccgaccgaacaatccaccattaacggtgcattgaagcagctgattgaggaaaacgatctccccaaagtggttttccacagcttccgacactccagcattacatacaagctcaagctgaacggcggcgatatcaaagccgtgcagggcgattccggtcatgcacaggcttcgatggtcaccgagcagtacgcacacattctggatgatgatcggcgtttgaacgcacaacgattcgacgatttcttctatcagcatcatggtgcagagcctgaagtcctccctcgcgcagagcaatccactcccaaagccagtcccgtcgatacagatgcggcagcagctcttgctaaactgctggctgacccctctatggctacactcattaaaaatcttgcaaagaacctataagcctctatacataaacagcggcagttttccgtatatggaaaactgccgctatctgttttaggatgatcccgtttctttgtgttttttcgccttagcttcctctatgtccatcttcagctgatgtgtaagctgttttacataatcgagtgaaacttcatagccttctgcgattttttctgccggcatcccatcaaggatacgggagatcacaatgttctgagtggcttgttttctcgactctgcaatcatttcctcaatagaggggcaatgtttattatgcatccaattcaagtaatccaagcgttcagcttctatccgcgatagaagcctgactgcatagaaattgtcatctacctcgaagcgaacttcctctccgggtttgacttcaagtttttccagaaccgcatctgggagttttacagttccatcttcaccgactacaatattaaatttcttttccatcgcacactcctaaaatcacgcaaagttccttgcatccagtgcctttactcccgtaagaataccataagccccttccttttacaagacaatgcgcatttccattcgcactgttacatagaccagagttttctcgcagaaagctctggtctttttctattgaaaacatttgtccatcacaccagctacggctgtatggtctggttcacgaatgctaaacaagcaaatatccgtagggaaacgtacacttcccagctaatgaaaggtgggcattttacaatgaaccttccacttttcattagctctgctaattttctgctaatgaaaagccttttactcgttttatttcggggtttgtgttctttactcagattgacagcgcaacaaaaaatcaattgataaaacgttacttgttttacctacttttgcctaggatttatggcttcagcccctactcctaagcggaaggccgtgtgttcgaatcacatcggggacgccacttaaaaatgcgaagatcatttttccatgggaaagacgatcttcgcattttttattttgaacctatcaccaaaatcagccagcgaatgccattagcagaattttcagttccggctaatcaagctccatagagcaccttatgcccagttcatccggccgtagcgagtggtcagctggcagatctccttttgaagcttcttggttagctgggtctttttcagccgccagcgccagttctggcctacggtagagggcttattgatgcgggcggcgttatccagccccagccagtcctgcatggggatgatgcaccttgccgctgcactgcgcaaaatcagtgcgatcatgcttttataaagctgctcgtccggggtggcgtagtcgtacaggtaatcccgcaccatggcgcgctcggcgtccgagatggtctggtaccaggataccagcgtctcgttgtcgtgggtgccggtgtacgccacgctgttcaccgggtagttgtggggcagatagtcgctggcgctgccggtatcgcgggagtcaaaggcaaattccagcaccttcatgccggggaagccgctgtcccgcaccagctgccgcacggtgtcgctcatgtagccgagatcctcggcgatgatctcccgcttgcccagcgcctgctccaccgcgcggaacagctcgatgccggggcctttttcccagtgcccatccaccgccgtctcgctgccgtaggggatggaaaaatactcatcgaagccgcggaagtggtcgatgcgcaccacatcgtacagctcaaagcagtaccacagccgggtgatccaccactgatatccggtcgcatggtgggtttcccagcgatagagcgggttgccccacagctgaccggtgggggaaaaaccatccgggggaacgcccgccactgccgtggggatgttgtccttgtccagctggaacaggctcgggtttgcccatgcgtctgccgaatccagcgccacatagatggggatatcgccgatgatctggatacccttgctgttggcgtaggctttcagcttgcgccactgctcgtcgaacttgaactgaagatacttgtggtactccacctcaaagtacagctcccggcggtagtagtccatggcaggctgccagcgcagacggatatcctctgcccactcgatccacggcttgccctcaaagcgatcctttaccgccataaacagggcaaaatcgtccagccaccacttgtttttctcgcaaaatgccgtaaacgcctcgttgtggccgatgtcgctgcgggagtacgccagccgcagcagacggccgcgctcggtatacaggcggctgtaatcaatgtcgtctgccttgcggccgaagtttgcctttttgcactcggcggcggtcaacaccctgaacgacgcctacgagggggcgctgaaaaccctgctcaccgccccggaccaccccaccgccatgctggtcagtgacgacatccttgctgtggtgctggaacagttctgcggcaagctggggctgcgcgtcccgaaagatttgtccatcgtgtccttcaacaactcgctgttctcccgcattaccagcccgcagctgaccaccgtggacgtcaacccctaccagctgggcatggaagccgccagccagaccatcaaccacattgagaacccgaaccttctggcaacaaagatcatcgtgccgcacaagctcatcccccgggagagctgctgcccgccgccggaggtctatagcaattcaactttttaatgcaacagcaacatcgttgaattgcatatcgcagagatgccgttttgatgttgcgctaatttcttgacttgcgataataagaataatgggattgttttctctttttcagagaagagggggtacagagccctgctatgcaaaaagtccacttgcccctgcgatcgaccagataaaatctttggcattgtggtcaaaattgtggtcaaaaacaaatgaggtcagcctataaacaaaaaaatccaacgatttctaacgtgaaatcgtttgatttatggtccagcaagactggacaaatccgaacttgtcggggcaaggcccctccatcttgcttgcgcaagaccgttctgttgctcaaaagccccactggggctttcgttgcttcgcaaacgcaaacttttttctccgcaatcggtggtcagagtgtcctcaaaccggacagtttgggtgccatccttgtagttgaacgtgatcagcatccggccaccgtacagaaaaatggcattgacaaaaatttcgatcagcgctttccgctgctttttctgcgaaatatcgaactttctgaattttatcagccagaaccggatgaaatcctcattgaagctaggcttcttcaacttttcgtctgcaattttgcagtcagttcatctttctggatttccagcgcttccagacgctctttcgttgtccgggtgtacaagtcgtcctcgatcgccttcatcagattgtccaactttttgttgacctctcgcagttgcttttccagcagcgggatcgtggtattttcctgattctggacatccatgaccaattaaacgatcttgtcgatcaccgcatcgtcctgaatcagcttcatggtctcccggacgaccagatcttccagccagtccttctgcacggtctttttgttgcagcccttacgccgcttgacgttggcgcatacttatattttttcagcaagtgcttcaccatcttacgcatacttgcgcgggcagtttcttttttctgcaggtctattacgctcgcattactgaatttctgcgtttccagccatctccattgcagcgttcgattgacacaggttgagttatcggcagatacagcaaacacaacgggcagctctggtaacagagttgcccgttgtgttcgtttatgaaaaggagaacttagatctcataccacttgatctcgttggcatccagatgcagagcaaagctgctgccgtctgtggtgtaaacggtggtgtcctgcggctcgtacgtgttgttcaccacacaatacttgccgttcttgacgtaggcgtgaacttctacattataattggagctgaaccatgtatgcagttcctcctcgctgtgggcactccacaggatagcacggtacagggtacggctgttggcaaagctgtacggcacgccgctgatgtacacagcgcgccccttgccgaagtcgtgggcggccatctgtacttccttgttccgctgcaccagcacctcggtgccctcaagggcgtagatgttctttttgccctcgccaaagtccacgggttggtcggcatcctgcagaatgaaatggtccgggtgttcttcccagttgtacttgtcgtagttgagggtgaagccgttttcttcttccacgcccaacacgctggcaagctggagaatgtggccctgatacgggtgaccggaaggctcacccacgccgataaagccgccgccgttccagacgaacttgcggatagcggaggagatctccgggtcttcccaccagatgccgccggtgtgtgcggtgtcggcatcgccgacattgataatgacatccaacgaatccagcagatgcgggtcgttcttgatatcctcaaagctgataaacttcacatcaaagggcgcaccggacagcatctcaatgacaccggcatagctatagttctgcttgtaatagagggcgtgatgcactatgtgacagccccaagcccgcattttaccccaacagttcagcacggccactcgcttgacacagtagggtgtggtgcccttgatgttctcgtacagttcgcggaactcgttgcagacgctctccacgtagtccacgaactccgggaactgcaaggccagtttcagatagccgccatagccgatgcggtcgatgggcttgcgcaggatagcgcggcgggctgtaacccagttctccttggcttcccgcaccgggtcgccgccctcgtggaaggtatcggggaagaagtacggcaggaaacggccctcggtgtacttcacgccctcaatgtcagagatcaggcgcagggtggagccgttgcccacgctgcccactacggcatccagtccgatggtcttgaactccggcataaagggttcggtgccgatccagtgatcgccgaggaacatcatggcttcgcacccgcacgcgtgggtgatgtccaccatctccttggcaagctttgccacctcgcggcgctggaaggcctgaaaatcccggaattccttgctgggcacccggtactggttgttatagtagccctgatcgatgatgtactccgggcggaacttgtagcccacttcctgctcaaactggttgaggatataagggctgaccgaggcagagtagccgtaccagtccacgaacttctcccgcttcagctcgtcgaagatcagggtgaactggtggaagaaggtggtgtagcggatgacgtttacataggggtgctctgcaatgaacttgcgcaggcgctccatggaatacttgtgggtcttgggctgacgcacgtcaaaggtgatctggtgctcaaaattcgtccagccgttggtggtagcgttgtacatatgcaccgggtcccagatgaggtaagccagaaaactgacggtatactcatggaacggtacggcctgtacggtcacactgccgtcggcgtagctccactgctccgggggcacgggctgaccggtggttcgatccatgacctcccaccagcgggcgatgtcgtcgttggtgttcacctgcatcagctccgggctgatgcccttcatcagcgggatggtgaccgtgtcgccgggcgcggtgtagaagccggtcatgatgtagcactgctgcacctcgtccgggttcgccttggcccatgcgttatccttgcgggtggtataataggtggagtagatctttgcatcggcatccttcagctgctgcggaaagtcggtgccgtcgcagtcgcggatggcgtctgcaccccactttttcagaatttccagcgtttcgggcaccacgtccaagtcggtggggatggtcacgcgcccggactttcttgtttcatccatagggattctcctttacctctctcttatcctcaatcctgataggtcgcattgtagatggccagcactgccagcagcagcgctacgcccaccagcatgatgccaagccctgccagctgtccggtcattttccagccggacaccaccagcaccagtgccagtacgaacagcaccagcatcaggatcatgcgcagggcgggatgttttttccaatatgctttcatcgtttgtcaccttaacctttcaggccgcccacggtcatgccctgcgtcagctgccgctgcacgcagatgtacaaaatcagggtgggcagcatcaccagcacaaggcctgcgtacatggtaccgtactgggcggcgctctgctgcgcctgcatcaggttcaaaagaccgaccggcagagtgcggggtgccttggtggagctcatcagggtcatggagatgatatactcgttccagaaggacaggaagttgaacagtataatggtgatgatggagggctttgccatggggaagatgatgcgggtcatggtggaaaaatagcttgcaccgtcgatataggcggcctcctcaaaatcgtggggcagggtggcaaagtagcccgacagcaggtagatagtaaagggcagcgcggtggcggcgtataccaccgccagcaccaccagattgttcaacaaaaagccgctgccgaaatggcttttcagccacacatcgccgtcccgcagcatcaggaagatgggcaccacgatgtagttcacgttgatgaacaggcccgccatgaacagggtgttcagtaccttgcaccccttgaagtgaaagcgggacaggcagtaggcggcgggcagggcaacgaccagcagcagcgccagcgccagcgcggtgacgatgaccgagttgagcatatattcgcccattttcgcgccgttccatgcgttgacaaagttctgccagtagaacccggcgggcagtgcccaggggttgccgtagaactcggcgttctgcttgatggaggccatgaacacccatgccaccggcacgatgatggtcacggccagcagcaccagcacaaaatagatgaaaaacttgtacagaccttccgcagagcgggaagatttttcggtggtattctgcatcttcttccctccttaaaattccagcgtatcgcggttggtgaccttgttgacacaggcggacagggcaaacgagaacaggaagattaccacgccgatggccatactgtaaccatacaggccagcgtctttctggctgtacatatagctcagcgccacatccgatgcgccgttgggcccgccgctggtcatggccttgacgaagaggaaggccatgttgatggtggagataataaagaaggtgagggtggtgcggatattcgtccagatgagggggatggtgatctggaagaactgggtcagccgcccggcaccgtccagattggcgctctcgtacaggctgatgggcacggcagacatggaggccatgtacatgaccatgtagtagccgatggcctgccacaccatggcaatgatgatggaggggacgaccagtttttcgcccttccacaggatggggtcgctcatgttgcggaacaggccgatgatgctgttcagcatgccgttttccggcttatagatggcagagaagatgccggagatgacgaccaccgacaggatgttggggatgtagaagatgatgcggaaaaagttctggcctttgatcttctcccgggtgaggatggcggcaaataccagtgcaaaggcgaaggtgatcagggtgaccgttaccaccagcaggatcatattctgcatggagcggatgaactgggcgtcccgcagcagatgctggaagtttttaagccccacaaaggtctcgttgggagaataggcaccccgctcatacaaactcatgcggaacacgttgagggtgggcaggatcataaagaggaaaaacaggatggtagccggtgccacacagaggaatacgaaccgtttgcggcttttatccgttctcataggggattgaccgctcctttcttgatggtactgtacagcccaaaaagcggaggcggtaaaaaccgcccccgctgggcagggcttaattactcgatgatgttggcgcgcatctggtcgctggcggacttgatgccgtcgatccactgctgctcggtcatgctgccggacaccagagagttgacagggtcgaagaacacggtgcgcacttccacgccagggatggcgctgaaggctgcaaagttgcccatagctgcctttgcgccgttgtcgtagatggagtagaacatcttgttgtcgccttccagactgtcggcgatgcccagcacaggctggatagcgccgctctcggcaaacagcttgcaggcttcgtcgctgtacaggtaagccacgaactgcttggcggcatcctgatgctcggcaccggcggggatccatgcctgctcgaaccaggtgtagctgtagctgtcgccgccggccttgacagcgggcagggcggtcatgccccactcaaagccgtctgcacggggagcctcggccatctcgcccacgatccaggtgccgttgggcatgaacagggccttgttgtccagcaccagctgctggttctgggtaaagtcctgatcgttggcctgtgcgggggtgatggggttggtgtaggaagccagctttgtcacgatatcaaagcaggtctttgcctcgggggtgtcccagatgccctcggtgtagtgggtggccttgttgaagaagtcggggccgcctgcggcgtacatcagtgcgtagaagaaggcgtcgaagtagccggtggtggggtaggtgaacaggtaggtgccctcagcggcagccttgtctcccagtgcccacatctcgtcccaagtcttgggcacgtcccagcccttttccttcaggaaaccggcgttgtagaacaggccgcaggggctgtagaacatgggagccagataggttttgccgtcgccgtaggggttggtcagggaggtgtcggtaaagccgccggcgatcttctcgctcaccttcttgctctcgccgggcacggtcatgctcagaacatcggtgatgtcagcgatcaggttgcccttgatgaactgctcggtcagggcagcttcacggccggtggccagatggaccacgtcggggtagtcgccgccctgcatggaggggccgatgacgtcctccagctttttgtcggtggtcaggtccaccttgatgccggtctgtgcggtaaaggcctcggcgaccttcttccacatatcagcgccgtagccggtctcgatggcggctaccttgatggtaacgtctgcagccgccgctgcggaagaagcggcggtggaggatgccacgctggatgcggtggagctggaagagccgccgcaggcagccagacccagtgcagcggcgccaacgccggccgccttcaggaaattacgacgagaaatacgattcatactgtgttgcctccatcattttgttccgttcaaacacagccgggcaaacaggctttgcccgaaggactgtgtgtttttctgcctccaatataaattctttcgcttccttgctcaagaggtttgttgtttcattttttatagatattgctttatgaaaaattcttccagcaaaagtgctaaaaatcttttaaaagtttcagcacaatccccaacctgtaaccgttttgacatatttcgaagggactcgagaaacaaaaatataaaaattagcctaaaatcagggcttgctttttttgtgtattccctctataatgagggtaaagtgcacgaagcaacgcaccattttttggtaatgttttcagaatgttgcgtttgtttttagaaaatttgcgtttcccggaggagccgatcatctatgagtacccagcgctttgatatccgccacgcgcccgctccgcgggaatccttccgtctgctgtacatcagcaagagccggtttggcggcgattggaacagtaccacccacacccactcctgcacggagctgttctactgcctcagcggcgagggacagttctaccttgccgggcagctgttcccggtaaagccggacgatatggtcattgtgaacccgcaggtggagcataccgagcttagcctgaacgcctcgcccttggagtatatcgtgctgggcgttgccagcatggagtttttgttcagcaaggcggatacgaactacgccatcttcaattgccgggagaaccgggagcggatggtcacgttgctgcacatgctgctggccgaggccgaccgcagcttagacggctgcgagaccgtttgtcaggacctgctggaggtactgctgatctggctggtgcgctgcaccaccatttcgctgcagctggaggaggctgccccgaccgagaaccgggagtgcgccgagatcaagcggtatctggacaccaactaccgcgaggatatctcgctggacctgctggcagagcttgcccacctgaacaaatactatctggcccacaccttccagcgggagtacggcatttcccccattacttacctgaaccgccgccgcattgaggagagcaagcatatgctgggcaacaccagctacagtctggcgcagatcagcgagctgatgggcttttcctcccccagctatttctcccagtgcttccgcaaggcggagggcatgacccccaacgaataccgccgtcagacgcggcagggaaaacgccccgccccgacaaaacggcatgaagtataacgaaaacgaggaatttatgatgaaatccattaccctttctctgctccagtctgctgcaaatgcctttgattttggcgggcctgtgctctgcgatgctcaccactatggtgaggggcatatcaacgacacctttgtggtctggcgggaagatcattccaaacgctttattttgcagcgcatcaacacagatacctttactaacccggtgggtctgatggagaatgtctgcggcgtgacccggcatctgcgggcgaaaattcttgccgagggcggcgatccagcacgggaaacgctgaatgtcatcccaactttgtcggggtcgacttgctatctggatgcagacggcggcgcatggcgtgcctacgactttgtagaagataccatctgtttgcagcaggtcggcagcgaagccgacttccgcaccgtggccgagacactgggcaaattccagaaccagctggaggattacccggcctccaccctccacgaaaccatcgcccgcttccacgacacgcccaaccgctatgccaattttgaaaaagccctcgccgccgatgcactgggccgggcaaaaaatatcacgtcggaaatcaaatttatccatgcgagggagcaggactgccatgtcctgctggatcagctggcagctggcgaaattcctctgcgcgtcacccacaatgacaccaagatcaacaatgtcctcatcgatgccgctaccggaaaaggcatctgtgtcattgacctcgacaccgtgatgccgggactttcggcctacgacttcggcgattccatccgcaccggtgccaacgactgcgctgaggacgaacctgaccagagcaaagtccattttgacctgcatctgtacgaagtgttcgccaaagggtatctctccactgccggggcatccatgagcatggcagaaaaaaagagccttgcatggggtgcaaggctcatgacgctggaatgcggcatccgttttctgactgactatctggagggcgaccattatttccatattgctcgcccggatcacaacctcgaccgcgcccgcacccagttcacactggtgcggcagatggaagaggttttcgatcagatgctggaaatcgtctgcccggacaatcgctgatttcgcaatctcctccattcggatacagcaagaagcatggacgctctccttttcgggggcgtccatgcttctttttacagcttatgcccgataatgtgcagcgtgatgtgattctggagatcattcacaagcataaggactaccttacctctctgaaagccgcactcgcagatgttaaagaccagacagcataacaacaggcacatggtatgctgtttaccgatgtccaaaggagcgtgcgtttgaacaaaaagaaaaagcccacaaacatttccccttatcccgatgaagtcatcgaccgtctggcacgggcattctacccggcgatccttgcctgctggaacagcgaggaaggccagcggtcacttgtcggggcggaggcccctccatcttgctaacgcaagaccgttcggtcgctcaaaagccccactggggctttcattgcttcgcaaacgctaattttccgaagaaaacaaataatccgaacccatctcctatcggaaacaagttcggattatttttgtttggtccaccttgcacatcaacaagcgaactattccctttatgctgcttccgggtacttttcactcgttgagcaccaattttcggctcgttggtggcgcaccgcataatctgtaattgttttgtaaccattccgcaaataaaaaatcccccgccagctttcctctcggattgccagcggggcattttcatttcagtgcagaagcatcgtcagttcataggccacaaggccggaaaccagcgccgcaatcacagcccaccaaagtttgttcccaaatgttcctggggctttttccagcgcagtcaggcggtcgtcctgctttttgttttgagccgttacaatttcaagactcttgtttgtgttttcgagttgctggatggtcaacttgatattggtgttcatgccgtttactgcatcggtcagcttccccagctcgtccagccggtgggtgttgctctgtgcacggttttcgaccgctgtcaggcgatgttccagttcctcgtcagtcattacgcttgtcctcccccgccttaccgaaacgggccacagtagtggtttctgtggatttcttcaccatgtaatcttcaagttttttcttggtaaagtcgaacacgagctgcacaatccaatccagcgtccgctcattgattgcccagtccagccagtccggggtgtacccgcgcagtacggcaatgacatgggctttcttttctgcgcctgcgccactaccgaacttttcctctgcgttgacgatccacttgtatacagtctttgcgaccacaaggccgtaacccagacgtaccgccgccagcgccgtgaccacaaggccgaccaccatgaagatgcaggccagccattcagggaatgccatcagaaaaactttcagaatgttctccattttgttttcctcctactcttaacccacccaacggctctttaccgcacgggtgtcgatgtgtacccagccagcaggacgaccagtttttaccgggtaacgtccgatgccgccggtgtttttcagcagcgtttcggcgtaggtcgcgagcgtttccacgtccacgccctgaatccgaatatctgccgccataccgtagcaatgctgactgtacgttgcgcccttgaccgccttgttatgggcggcagtgcgatatgcgctggtgatcgtaacagcctttccaaagtgattccggatgttctgcaacagtttcaccaacacatcatcaataaagatggggtcagtcccatccttgcagcgaaactctttcacggcaaagtttgcggacagtttcttgttaccatcctttgccagtgaataggctttaatcgccattgtcgttttctcctttctggctcaataccattttgcagccgctcgacccacactcagccaccagcacgccgaactcggcccgttcggtggtggtgttctcgcccttggcttccagcctgtccagcaggctttcgcacagatcgggccagcttttatgctgcatagtcttcgcccgtgatgttcttgtagtcctcggcggtgatctcgcccttgtttacgcgctcggccagaactttcttcacgccaacgcggcgggatgcgggcatctctgcccaagtcttagtgcctgcaatcaggcggtttgcccagataatgttcatggtgatacctccttattccttgttcaacgctgcgtccagctcacacagcgcggtttcgatgtcggtcaagcgcttctcgttggccgcgtcctgttcgcacagggcatcttccatttcagccacacggtcgggcaactgttcgtgctcctgctgcttcttggctgcggcttccttctcctgccgggtgggcagattgtcctttttccactgaatcatggtgactgtcctccttactggaatgcgccggagacggcttcgatgtagccgccctcgccggattcgccgcgctccacgctgacgcggaagttaaacgccgcgccgttggtggcggtcttattctcaaagacgatgttcacgcctttttttacctcggtcgtggcatcctgccagaccggggagctgtcgagtgcgttgttggtcacttcggctttgaacttcgcatcatcggggatggagccggtcacctgaagcacggcaacggtaatgtcgccctcaacggccaacggttcagccagcgtcacgcttgcggcgtggacggccttggtaaaggtcgcggacgtgctgacggtttccttgccgtcgctcacctcaacggtgatggtgtggttgccgttcaggattttctggaatccggcagcgctggccgtctgctcaaaggtcagggccgtgccgctggcaacgccggtgcgggtattggtggtcttgccgtccagcttttcggtgacggtcaaggtgtcgccgtcggcatccctgacggtgtacttccacgcaaaggccgcgttcttccgccccagagctgcgccgtccgtgctgacggtaggtgcagtgttgacactgaccgtgccatcgtcagagaccacgagtgtagagggaagaatgaaagcggggcgaacaccacaggagctgtagtaccagtagtagtcgttggagccatcggtgctgacgccccagacgctgatgctactgccggcgtacggagagcgcagccaccaaaaggcagcggagctgccattgtatgcaatacgcttgctgttaccgctggagctgttgccaaagtatgccagcctcacaccgtccttcgggaaatagccgttgtcgctggtcgtccaaccaacctcataaccagacagcaggaacactttggtgctcaggccgttggagccggtggcaaggctgccgccggaaccagtgccgttctggtacgggattttcacctgcttaatagccgcccggatgttgctgtcgatgaggttgtagaacgttccgttcaggtatgtgtggatgctggaatccttgtaggagttattgttgccgaacgtggacgtggtgtagatgtccttcatcagcagccacgttccattgcaactcgaatcataggtgctggtgttcgggttgccctgctgcacaacaataaaatctttggacgcgccgttgactttgattttgacaatgctgccaacggctttcgtgcccagttttacgtttgccattgttacctccttgttttcgttcaggcccacggcatgatctccgcgggccgcgtgttctgcgatacagagagggacagggctttgtgctgcttcttgtagatgcagcggcattgcctcgcccgccgtctgtcacgcgcgagtttgttcgagttgatttttcgatggatagggattttacagtcaagcaatttttcgagccggtcagcgtacttgcggcgtaaagagtaagtatcaccatgggcggcatgggcatcccacgcatcaaagctccgcaggatttcctgcttggtcacttcgcctgcggggtatgccgtctcccaatatctgatcttgttcttcatccgcttggagctatcccggcgcagcttttggatgaccgcgccggtgtcggtcaggtagctatggaatcccagaaaatcaataccgttccgcagcgggaaaatggcggttttctggttcagctcaaggccgtaactgtccatgagcgcccgaacatcccggagaatgcactgcaatttcttcttgtccgaacagatgatgtagaaatcatccatgtatcggccatagtatttgatgcggtacttttctttgatgatgtggtcgaactcgtccaaaaacatgagggcgaaaagctggctcgtctggtagcccagcggcaagccgtcctccatcacgtcgatgtagatgcaaagcagctcatagacacgcgggtcaacgccgcgcttgtccagcacggctttgagcttgcgttttagcttccggtggtcgatgctggcgaagaaatgccgcacgtcgcctttcagcacccagccgtccgcgccgtggccctcacggcggtaatagtccaccatgtgggttttcaggcgcatcaggccgtcgtctgtgccttttccggtctggctggcgtggctgtcccggataaagctctttgtcagggcatcatacaggatgttatcgaccagagcgtgcagcaccaccttgtccacaaatgcgggggcgtgtaccatgcggcgcttcggctcgtagacggcaaagacctcaaacttacttggcacatagcgtatctgctgccgaatgctcccgtctggctgccgcacattgcagacagccagcttacgggagagcttttccgtgcaggccagcgcctgcgcctcgtactcgattgttttgcttttactgcgctttcccttccgggcttcaaggtaggctttgtaaagtacctcaaagctgcacagttcttcgtatgtcaaaatgaccctccgctggttcgcgttacggtagtgggctgcatccggcagggatggcccacctcagcgggatgtatttatcacttgcctgcatcggcaagcgacaggatgcggtttcctttgatgggcgcactgctttcagcttatgcctactcgtcacacggttccatcagagcggggcgaacaccataggagttgttgtaccagttgttgttgttggagccatcggtgttgacgttccagacgttgttgttattgttggtgttcggagagcgcagccaccaaatggcagcgtcagacaaacaaaccgcaccctttatgcaaagcggttgcccgctgtgcgtttacggttccgggtaaaggacggctttcagggcggcagcctgttcggtcagccgtttccgttccgcttctgcccggagtttttcggcacgtccgcgttccgacgtgagccacttcatcgccgggtattttacgtccgtgaccttctttgtccagataccggctttcttcgcactgatgataccttcctccgtgcagatggtcaggtattccagcagcagagagcagccgtccacaactgcgccgatcttctcaacgcgcttgtcgtagtcggtctggaaattgacgttgttcgccgcgtgtgcatccagcaggatttgccgggcggtcagccggatgccctcgccgtacagccggaaagtgcttttggaaaaaccctccctgtcccgcgtgtcgagtgcatggacggcagtgccacacaccttctggatgtcgcgcacatcttcgagcgctgcgactttctggatgatcttccgggcatcgctccggctgatgtcatcggtgacgatgcgggttgccctctgagtgtagcgcaacagctcccgcgcattcgcgccgaccttgaatgtttcagccatcagaactccaccctcgcctgttctgcgttccacacgccggtgacggtcagaccatcaaggctgccgaacgtggcagaaaaagggttcttggtgacgttcgtgccgaacttcaactcgattgccttaatgctggcgttcatcgcggccacgctggcgcggatgtcgccgtgtgcattctctgcagagttgtgggcatcgacggcagagctgattttctggtcggtctgagccttggtgtatgcgtccaccgtcgggcgctgcgattcggtcaaatggccgtcagcatccagcgtggcaatgccgcccggcacgccgatctggttagtgcggacaacatcttcatccggcgccttgccggggcctgcgttaaaagaaccgtatgccatttaggttcccccttcctgtgcagccgtgtatttcacggtgcttgtaatatgatactgtgcagaaattttctcggtcggagctttggcggccctcagccgcagctttccttcgaggctttcggtcgcaataaaacccaccgcacccgccacatcgtaaaattccggcagtaccgtaacatccacaatgtcggtagccaacaggcccgcaatggggatgtcacaataaaaatagccgggggaggaatcatcctcgccccagccatcgaccggaatcgtaaaagacaccgcagccgtgacatcctgcttttcgtgcaggatgtcatcggtttcctcgaatccgtttgccgttgcttcggaaaggtctccgagtgcggtgttgcactgcttgatgtggctgcaaagcgcggcaagccctgtgcccaaaagcgttttgaccttcgcttttgccatagagcttacctcctcatgtcttagtcagcgtcagccagcagagcggcgatctcctctgcggagaagtcctccacgtcctcgtcgtgcagaacattctccggctcggtgtacacgacgacttccttgccgtcgatgttcacattgccgttggtggagctggcggcagtcttggttgcgccctcagagacaccggccagcttttcgccctcggcatcggtcatcaggcgcttaccggtctcagcagccacgaagtcggcaggcttcttgccgctgtcggtcaggttgccctcgccgtccagcgcagcgaggttgccggtggtagcaccagtgaccttatcggccttgccggaaatgtccacttcctcaggggtgggaacatacagaccgtcgttcttcagggtcagagcgttgcccgcagcagcggaaacattgaccttgacatccacctcatagccagcgatggtaacggtggtggaagcatccttgccgacggccttagccttgtaggtatccaccagcgcagccatgctcaggaaagagtaggtgcaggagtcaggattctcgcccttgacggccagcaccatgacgggcttgccgtccagcttggggtcggtagcgccggggtaggtcgcagcatcgaacttgaacttggccacgaaggtggtcttggtctggtcgaggaacagctcagaggggaagtcaacggagaaagcagcagtgccgctcttgtcggtagaggtgtagaagttcacggtgttgccgtcaacgccaagagacttgatagcagcgttggctgcggtctgcacaggggtaaaggcgtccttcttaacgaaggtcttcttaatctcggcggtcaggttgcggatggtggtcttggtagaaatctgcttagacataatagtgtcctcctaaaattatttcagcatatcaacgatttcctgctgcgtttcttcctcgttcagcaggtcttcgctcgtcataacggtttctttgcggacagtcagcgcgtttgcgctgtcaaagtcaaggccttcgccaatgcggacggcaatagcgccgctcgcgtcacgcttcaagccctgaccgatgcttacgctaccggtttcacccgaaccacctcctttcccgaacagggttacggtcgcctgaatatctgcttccgggatgcgctgagcgaaaaatctgatgaaaccatcatgcgtttcgcacccgttcaggacgcccgctttggtcgtagtatagaagctgccgggagatacaacgccaacgggtacaagctcgctggtgctgtccgacagttctgcatcataaatgtactggtagtaatccataccgccagcgttttcgtaatcatcctcgctgcgggcgggcttccacccgtcagctgcaagggtgagtttgtaggagccatagtagccgccgcctgttccgccgtccacctgctccttgataagagcctttacctgttcttcgttcaggatttccccggattcagacaggttcttcacggctgcactgaccgctgccgtgatagtcgccgcatgggcgtcggcattggcattgtgcttctcgatctcggccttgaccagcttcatcaacgcctgcacctgagggtcaacggtaatgctgatattggccttgttcgacacagcaagcagcgccgacagctcaatctcaaaatcgctgttcactttcgtggacgggacctccactccgcgtgcatcctgcataataaacaggagtgtttctgcatcgtcgttcagcctgccgtaaacgcccacctgatgcatgatgtacgtttcatccgcaccggtgatctggatttttacccgccgagccgtctcaccgccgctttcaacggtttcgatgtccagcaatttcaggtcatgtgtttcgccgcttaccccggtttcccccgaaaggtctgcgtcagccgtaccggtgccgctcacagcgcgggtgattaccagcgcaccaccggagagagattccgacagcagggcggcaccggcggcggtgtagctagatttttcccaactcacgttgtctgtcctccaataacaatgtttatcgccgtgtgcgaccgttcaacggtgcccgccgtaaaggctcgtgctttcactgcctttgcttcaacggcaccgggcagcgccacggcaacctgcattttcgatcttccgaccgcaccggcaacatacgcctttgcgccgatttcccgcggcttgatcctaccggggacctttacggtgcaggatgtcgccatgccgcagggtgcggcggcgatgtaggcgggcgatctttcatgcggttcgatggtgtagatgatgtgctcaaggtgagcagtgcagcgttttgtgtagcccagcagcttttccatttctgctgcggtgtgatatgtttcctgatcgtcggtgatgtcaacatacagtttccagaatcccggtgtccccccatacgagaaccattcctcaattctggcttttttgtaaattgtctccacctgttcacgaacagcctttaccgttcctgcataacgctggatttcaattgcggttcttacgagcttacgcttcgtctcaatatcggcggcagaatcgtaccattcgattttgagatagattgccatttgatccagcattccctcgctacagttatccacatccgagaacgtcatgcccgttgccagatattccagcatccggccttgaagttccccgtatactgcagacagcacctttgcccacggctgttcagcaacgacccgcggcagtccatctgcaattctcgcgtcctgcagcttaatcatcctcgacacctccgtagatgatcgtcggggttccgctcagttttgggatttgcactgttgctttttccaaatccgaaccgccttcgactaccatgtaaaccggttgtctaagctctactcgttttacgccagcgacacgcaagcgataaatcaattccatcgggctaatgtctctcccgatggagcgctgccactgctgaaattcctcaacagcttttgtaacgttttcctgaacaatacttgcgcccttcgcgttgcccgctccgatataataggtaaagtcaattccgtactccacttcttccggggccttacagatcacctgatctgtcatggggcgtcgagcttcgttcatcagatatgcttgcatttcgctcatatccttttcactcggcatccttccgcccgtcagcatgaaaaagatatacactgtgcaaggctggctccgtggactgactgcaattgcattttccacatcagagcggaagctcattgcccaatactcgtaggcgtctcgcggccctgcgcaactatacgttgtcggtgacagccaaatccgccgggtcaagctatcgtcgctttccgcgtctgcgccgccgctggatgtatccacattctccactgccgcaacataaggaatggcgtctaccagcgtatcgacaacgccgattggaacgtcgtttccgctggctcctaccacctcggcttgcgccaacacatcaacataggtctcgccaatggcaatctgtgcataggccgctgtggcaaaataaatacccgcggcagttctgacgcgggttccctgtggaatcattacaactgttttttgttcagccgaaagattaaatcgaattgtcaccgttgcataggttgcttcattccgcttcacgccgaacggaagccccatattatccagcgctgcacccgttgctgttttcagcaaggcgcagcgggttcttttttctgcaacctgcagcaccatgtaatacagctcagaaatacttttcagcgtaagagtgattgggtcagcactgtgcaacggcggggttgttccgtttaccgctttgtaatttcgggtgtaaatttctgtcaccagattatttacatcctcaagcgtcatattatctgtgacgctatactccgggatttcggcaaattcagcgatattagacaatgtttatcaccaccttcggtcgaatgttcccctgctggcttcggctggtttcatagcttacttccagcacttgtgccctcggttcgtacttctttgtctttcggatgatctctgccgtgagcttcgcttcggcagcttcggctggcaggctcaagcagtccatgttcaggccaaactcccggtcaagtgcctgttcaccttctcggctcccataaagcgtcttgagacagttatatacatcccgttcttctgtgctttcggacggattgatctctacatcaatatcgcccagtatcagcttttccagctcaccgctcatgtgtactcctttagcgtcaaggtcagctttccgcttgtcagtccccagaaccgatgtaccgcgccccattcatccgctactttttcaagcataaacggattttgagaaaccggcctgttgttgatgatgaagtagtctactgctccggcttcgcacaaatccattagggcgtcaaagacctttcgcggatttactcccagccttgaactaagcgtaatgttgaactgatactctcgcaggccgggacttacatattcgcttttatcttttccgccgatcacgctgtgcgtcgcccagttgctcgacgtacttccactgatgttgtccggcgtaagaactcgccaacttgatactgtaaacaccagtccagcaaagctaccgatgctgccccatgccataaagaacaccccctcactttaccgggacgccggtattccccgaaacagtatacgggccagcttttgccgacccgtcatgttcgtgcttgtgattcacaaggcttacgccattgattttgcagtcgccagagccgcccgaaatattcaccgttgctcctgtgattttcaccgtcgttccggtaatttcaatcgttccgctctggcaaaccttgacggtcgaagccccgaccttgaaggtcacgtccccaccaacagtgaagtccagatttttaccgatggtctcttttgcattcccgtcgattttttcttcatagtctccgctatctccatcgtattgttcaaaggctttgcccttcttatcgttgtagtcataccggtaacgttgtttctttccaccgaccggcttgttatcctcattccagaacgttccgatgcacgttcccatttcctgactatcggaattgtggagaacgcaaaccatagcaccgacaaccggcatccggtacagcgcatttgaaaccacacagatttcatcggtcacagaaccgtcccgatcttcatatgcaacttcaattgtgccatcctcgtaattcactttggacactgtgccaatgcgaatgacgctgctcatcgtgtcaccctcccactctgcttgctgagaccttcgtcacaaaaccgccggatttattcatggtgtgccctacactgtccatgtaatattttccgtcgattttcccatatccttccacgtcaatacactgcgtcgcgcaatatgtcaggtttcccatagtcgtaaaggaaatggttgtagccgaatggtttttgttgtcgatagccgcctgcaactgccgttttgcgtccgcttcacttgatgcatactggtttagcttcaacatccggtctgccgttccgattgtcaccttgatattcacttttttcttttggttggaataagtgaactcgcctccggtgtatgttcctgccagcgttgtgttccagctcaacgagccgggcacaatgtcaatcggttttaccgttgctaccgaatcctttttcttgtacttttcacggtcaaaaatccagattttgttccggtatgttttgaggatcagcccgtatgtgctgcaaattttctgcaagaaagagctgtcattatcgtcctgttctttcagagcgacgctgacatcctctgcatccatcttgcattccaagccgtaccgcccagcaacggtttctgcaatgcgtttgatgctcgtgttcttccaaacctgctctctgtttttttcatgaaagctcgtcccgtttggccgggcgaccgctccaatcgtcaaaacatccgggcaggccgaaaagctcagatcatcaactaccagcgttccacaatccaaaacggttctatccccctgcacgatccagtttgtcgtgcagagggtcgggtgcagcacagcttccttgtctggcatccacgaatcgatccacttgtgatccatcgcgtttaccttaatagaaaggctgtcactcgaatccgaaccgctatcggtgtatgtgaagttttccacatctttgcggatgtcgcttgaaatgtcctttccgtcatattcaagcgtcaggaacgcttgacgtggcgtaatcatccctcacacctcaccttttccaaggcggcagactttcgtctgtttttgccttaacttccacttccggcgtggcaagcaccaccccggaatcaaacttgtacacctcgatatactcccggttggcagtcatcagcacatcggctttcaactcgtcaccgtagacagtttttgcaataccatcccaagtgtcaccgctctttgtcgtgtaagacatcaggccacctccttatgcataccgggttcgattgttttctcggttgtatttgtccataaaggctttgaacttttcgtactcgtcctccataatcgaagcaatctgctggcggtctgcatcaccagtgattgtgatgttcggagcaaatacaaactgcggagagcttccgccgttgccgccgggtacaggtgtattctgatatgcgctcaccgggatttcggacagcgtgcgcccggtatccctcggcggcagcacataaagcggcgttcctgtgtctgtaaggacaccgtcctgccagcttgaaagcaccgtgccgccgttgtagtttttggctgcttcggtcagtgcaatggttacagggctgtcacttccgaggtacttgttcagcagaagcggagcaacatcagctgcaaggctggtcgccgccagtgcaagcgaagcgtcaccagacattgagttgttggcgaccgtccatagcatcgacaaagcgtcgccggtggttcggatgccattggaacgcagtgcgtacttaccgtatgctttggagaaatcaatcaggttgtccagtttttccttgcttccgtcggtgaaaccgccgtttgcaaaataccgtacacccgccgcacgagttgcatcctcgccagacactcccagcatccggcctgcacgcacccagttttcgacgttgctatcatgaacgctaggcttgaagctgataaccgcctctgttccagcttcgcccgcaatgctgacaccgtgagtaaaaccgccgttcgcaaaggcaggcattgcaacttctttcaggttgaagccgaatttttttccaccgagggcaggcacccaatcaggcaccgtaaaagacactttgtttagcgtgccgatgattgcattcacaaccgtaatcgtcaccgatacaatgccctttatcaatccgacaatgccctgaataacaggttcaatcaccggcaacagtccatggatcacatcgacgacgagcttgattgcgtttatcagggttgtaccaaccagactgataatcatgcttatcagcggcgacactgcggggaacaattcgtttacagcgaagctcataatatcagccagcagcggcttaatatgattcactccgaggtctacgatctgtccaatcagccctttcaccgattcgataatcggtatcactgccccgaaggtggttcctaagtcgtcgatgccgaaaatgctctttccgctcaagctctgctggatgttttgcagattttccaaagagaatgcattgctcaccgaatcgcggacgttgcctgcaatatcgtggattttactcgtaaatccatcaaacattgccaatcccttttcgccgaacacgttcccgacgatctggcggatgtcctcaaagtgatctcctagcaggctgaccactgcgatgattccaccgattccggtaatcaccgggccgaaggtgccgagcaatcccataaaagcaccgcccaatttaccggctatcgggcctaccgccgtgttggctaggctcagcccagaaccaaggaatttgaacgcgtcccctgttcctttcgcaattcctccaccaacgttcaaggcgaattgcccgactttagtagatgctgcgcggcctgccagattttttacgccgccaattgccgttcccgcaatgttttttgctccacccagcaatccttgcccaaagcccatagccttttggcccatgttccctacaaagccgccaagctgtgtaccggtaactttttgtcctagccaccttccaactccaaccgtgttctgtataaagtctgtccccgccagattttttgcagaccttgcaactctggctccgtattgccctatcgaactgcctttcaacagtccgattattccgccggaagcctgtgcttgctgaatgctgccaaacagcgcactcgttgcctttgccatcccagcaggcgtctttgccccaaacagctttttgctgttttgcattccaaggacgctaccaaggatggtgttctgcactctctgcccgaagctaggattgctgcccgccggaacaacgctgtttgccagctgtgttccaagttttgcagcctgccacagattgccagcttttcctgcaccagacacgcccttctgtacaagccccacagggctttccgccccgcttgcaaacttcgtcgcgctggataccacctgcaggatttgcggtgcaaaccgcattcctgcccatgccgtgccgatacccgcgatggtcgtagccaccttatcgccattattcagcagatactcaattacctgccttacacgttctgcaatatccggcagagcggcgcggaggtcattcagcttttcgatgccaaacccggctacatctttcagcaccggaaggaaattatttccaacctcaatgcggacggcccgccatgcgctcccaagcatcgtcaatacagattcagaggtttcgcatttcagcataaactctttatacatactgccgttatacttagaagcatcgcctacgtcgtccagcgttttcacaaacaagtcaagattgccggttagttttgcgccactctcaatggcccactgaccgagcagagttttcagataacccacttgcttgtctttcggctgagtaccgatagcggtaaacaaacttttcaatgctgccggggcgtctttttgcatatcctttgcaaactgttccgcagtaaatcccagctgttcaaaagccgcagactgtgcatctgtagcttttgaacccatagaaaggttcgtatacatccggcggatggatgttgccactttaccagaatcaacgcccattgccagcagtgctgtagaaagcgctgccgtgctctgaacatccatgccagcgatttgacccagagagccggtgtcgtttacggtctgggcaatttcagcggcggtcgttgcgtagtgggcacccagatagttaatctggtctgccagctccatgacctgatcgtggttcatgttgaatgcaacttcccactttgctgcccagtcgcctgcctgatccgcagaaatatccatggccgtgcccatttcggcaacgtcctttagaaacccgccgcttattaggtcatccatgctctttccggactgaccagccgcagctgccagacgtgtcagctctttggcggtgtacggaatttgtgtgctcaagtcaagaatgtctttcgacatttccgcataagcgtccgttttgacctttccgttcgcgtccgtcagaccgccaacgtacttcgtcacatcaagcatttcgctttcaaatgcaactgcttcttttgttgcatctaccagccccgctgtaatgccgctggctatgcccaccgttacttttgcgatattcgctgccagtttcgatgcgccgttcgccatactgctgagctgagtattcgcagactttacagcctgcgtcagcgagttatcaacgtgaccgccgatcaaaatagaaagctctagggtttgattttttgccactcctccgccacctcctcgttgatttccaccagctcacgcacgggcagattcaggtagaaatctgcactcgtgtgtgtagccgtggcgagggctatcgccgcctttctgatggttttgtatccgccctttaggcgaaaaaatccttgtggttcacccctgcgcgaagctgtacagcctccgccagcggcaggccgaggaagaatgccacatccttaccggtggccatagatgcgatcaggcagcagtaatagtagttcagggtcttttccgctgcgcgaatatcttcttcctccatgcggttttccgcctgacggacgttcatgccggtaaggttcgccacgcctgacaggtcaacttcggtgtatttttcgcccttgtaggtgtagggcttgccgaacttcatgatgtggctgtgctcgtcctcgtcgccatcttcctctgcggcggcgctacggagcgacgcctgaacagtctggcgaaccttcttgcttgcgccgatgggaagcagctggaaaaactcgatggggagcttcgttgcggcagcggccagagcgtcggtgtatgcagtcgcagtttcaggggtaatcatcacggccatttcgccctcgttgtacagtttcttgatgatgagcaccgcatccttgatggtcagatcatccagaccggacaggtcgatctcggtatactccttatcatcaaacttgtacgggcgggccaactcgatcagcttcgggttcttcttaacctcagcggtcttgtcctgttctgcgacggaagaaacattcttttccatggtggttttcctttctgttcagatataaaaattgaccgccccggtctttcggggcggtcgcttcatttctttggcgttagatcagcgcggtaacgtctgccagcatatcctcgccctgaacgcggtatacgccgttcagcttgtcgatggcaatgatttcctcgccgtcgttctcgatcatgatgtaggtcagttccagcttaaccttggcttccatgccctcgcccgccttgatcttgccgggagtaaactccttgacgcggccaacctcaacgatgcgcaggcccttataggcatagccgaggctcttatccaccgcctgctgtgcaacgcggaaggtaaggttcacctgacgcttcggagaaaggacgttgacaaagctcgaatatacgaggttgaaggaaacttcctgctcgatggattcaaactggccgatgttcggtgcggaaatcttaccgaggataccagcgccggaaacgtcgatagtctccgaggtgatctgcggcagagtgatttccggtgcagtgccaattgctttcacgccgtcaatgtaaacgttgaagctgttgacgatttccggggtcagattcgtgtccagtgccattgtttattcctcctttctgggttagcccgccagcgcggtagaaatcgcgttgggatcaaactccacaatttcctcgatgtcctccgccggattaaacggagacatatacttgtggaacttcaccgtgccattcagcagatcggtcgtggggttttcggattcgatgtactgcagctcatagcgggcgcaaatgccacggctgacaaagctgttgccgcgcacgttctcgctgtcaaccagagcctcgatcaggcgcttgttcagcgggtcgctgaccttctggaaataggtctggatgaaggtgttatcatcccagcagaagaacctgcggacgctgaaccagcgatccttcgggtcagtgttgccgggataacaggcagtgttgttgccccacagacggaagccgttcatgttcagccacgttgcaacgccgaaggagttgaccacattggcctgctcctgatccagcagaacttccgttccatctttcaggcaggcagcagaaatagagataggcttgttatccgggcttacgttgggaatatcgccgttgttcgcatcggtcgccacggtcgccgcagcagccattgccgaacccgcatagatcacgtcgccaacctttgcgtacagccacacagcgtagcaattcgcactggtcacagcctgcttttccttctgacgcttcacgtcgtcatacttggttgcaccggcagtagagctgtcgatgtccacgatgcacacgcagttgaaaacaccgttgatgtggcttgtctttgcctgcaggccagccgacaccagtgcattctccgaccagcccggagcaagcagaatgccgggggtcatgttcagcttcgggaaaatctggcgaatgacttccatgccgctctcaacaccatctgcagtaaccgcaccaacgatgtctgccggggtaacagcagtcgggtcgatctggacaccgctcacagtcaggctcgttgcgctgtcgccagcaccgccggggatcaccacgatgttcacataaccgttatcgtcaaatgctgcggtgtagtccgtaccagccgccagcggagtttcctctgccttaacggtcagcttgtccagcaggatgtccttttcctccaccactgcaacgccgtcattgacctgcacagttttttccggcagatttttcttgtgcttgttgggatcaagcacgttaatcaggatcatcggcgacacgccgacgaccttgaaacttgcgcccatgctctggcagacggtgtacttctcataatcatcgtcgtaacccactgcggcagttgcgcctgccagcgtatttgccagcatgggggtattcgtgcagtgatacggatcacttgcgcggttgatcggcgcagtgccgataacgacctgcaggccagcagttgccgtcacgggtgccacgatactggttccctgctcggcaacataaacgccatgcttgtatgccatgttctctccctccttagttcagtgccgctttcactgcggcaaaaagaatacccgcgctgctcttggggttctcaagagccacgcgagtatctttgaatttatcaagaggcaccagcaggccccttgccatcggtacggcatcaaggaaacggttcaccgcatccggcaccgccttactgtcatggtacaccgtgtactgcttcaccgtgttttttaccgtcgggccgcagtaaaccatcggcccatccttcttgaccggagtttcggtcgcagccgccttttcggtctgagtattttttgcattgctcatataagttcctcgatttccgggttgttttcgctgctcatgctcggacaagtaacatccatctgcaccgtagcgaagtaatacgggcttgtatcgtcctgttgaattgcgcagtcaatgggaagcaacacgttgaaataatcgccaaagatgttgtagacgcggaaatgctgtccaatatcctgcatgatgttgtacaaatccagaacggcgggagcttttttatcccgcacaccttcctctttgttgcgaataggtgtctgatatgtgcaaataatcaggctcatgtccaccatttcaggttcttccatcttatcaatgctccaacctgctgccttgaccagaataaacggagccgctgcagccaccgtatccacatcctcgtcattgccgaagtcggtcggaaattcaaaatcgaaaatgttgagcggcttatttttgccttgaccactgaatgtctttcctgcaaagagcttgtccagttcttcatgtagctttttcacagcgtcaaccggtgtgtaattactcgctctcactttgttttcctcccggcctgcgtcagaattttggatacttcatgctgcagccgttcctgcaagataatctcgctgtccggctcgacttcctctctccatacggtgctatgcatcgcactggcagacgggctggacatggtgtagagtttttctacgacgccattcttactgcgccatctggtcgatttcggatttgccgccggacgaccgatcaacctctgcaccatgccgacgtgcccactgtcaaacttcacaagaaagcccttgcttgcctgtcccagcgccgtatgtccgccggtcaatgcttccatcggcgattttttcaaaacacgcgatgtgtggaactccggcgacaacacccagtcccttcccatatgcggaacagacgggttcgactggaagtcgcccagatcatttctccggctggaaataaaaatctccgccgtcgggttctgcgttgtcgccctgttgcgaactttcagcgcattcaggtgacgacggccagcagaattgacagcataccgaagccgcgcttgccggatcatcatgtttttggctctcgtcgcagtctggttgacagcgtttttcatggcccgcggggccttatcccgcatatctcccagtgcacgttccacttcaccgatgttcggcacctgcacgtcatagattgcctttgccattactgccgcaccctctccaacgtgaccagatacagtccatgctcattttgacagctttttatcgtgtagctgattcggtcgtactccatcggctttccaatctttggagcagggccatagtcagccgcccggataaagaactgcttttgcgagatgtacaagccttggtcaaagttttgcttggcaccggcttcccagtgtgacttgcgctctttcagtccggtttcatacggcaccacatcaaacgtttctccgtcgatggtatgctgttctacaaactcctgaaaaaacacatcgtcaatatcagccattgccatttccaaaaagtcggtcatggtaatacctgcttactctgctgcagtcttgcggccttttctgccgggcttttcctcggcttcggatgcttcttcctgcgtttccacatcgttgctgtcggcgtcagcctgctccacaatggccttagtttccgcatccagttccgcttcagcggcaacgcccaatttcacaaggcgttccgcctctgcatcatcaacgcaaacgacctcgcccgccagaatcagcttcgtgggtgcaccagctttcgcccggaagccatagccgccggaaatgatctgaacgaccttcatattcctgctcctttctcttagcccacaacgtcagctgcatagatgtaggggcagtaggtcttgggtgcggccagaggacggcagcccagacggagcttgcgggtatccttgtcctgatccacaaccagctttgcaacacgctttgcggcataggtcgtgtagtcggtcttgccgtagtccatctgagtaatggagccgtacatcatatggccgcagtccggcgcagtcaccatagctgccgtagccgggaagtatctggcgctcttgccggtctcgtcctcataggtttcgtccacgctgaacacgttcagcatgaaaccgccgaagtttagcgtacccataaacacaacgccgtcgtactgggtgagctgctggcgaatctcgcctacgatgatgccgctgttcttatcgagcagctggcgggttctttcgtcagtcaggatgtagtcggccacatcagtgccgagaatcaggtcttttgcaggcagaccacgagcagacagcatacggcacatggccttaacgtcgccccagaagtcaccaccgttctcgttccacttcttggaagcggtataggtatgatcgctggtgccgtcgtagaacttcacaaccagagaatctcccttggttgcaccgtcgatgtactcctgcataacgcagccgttgccgatcatggtttccgccgccatccattcctcgcggcgggcaatgcggttttccatgtcgttcatgtcgtctgccagcaggcgggcggcacgctgtgcttcatccatgcccggatacagagcctcaccgaagccacgcttagtcagctcgtcgagggtcagcagacgagacggggcgatataggcgggcttataggaatgcacctcatagctccggcgaccaatgggaatgtcgcccgctttctgatccacgaatgccgccagcttacggtcgccgctacggtactcggtcagaacttcgttcgccttgaagatgtcacctgccccggtggggaaatagcgatccttgaaaaagctgaccttcgggacaatttcctcggaaattgcctgaaggataacattatcaaagaagttaatcagaattgccattgaaacgtcctcctgttacatttcgaccacaggcagcagaacgatgtcccgcatccgcagtgcgtctttgtctgcctcggtcatggtgtagctgtccttgacggtcagcttgtccgggttgaaacagcctgccagatagactgcaacggtttcatccatgctggccttcatagtcacatcctcaatcaggatgcagtcagcggtcagagtatcgccgccggacgcctcggttcccagaatgtgcagctttccatcctttgcgctcttggcaaacaccgtgccacgcacaaatgtggtttctgcttccgggccagcaatcacgccggggccgacgcgctttttcgggttcacgcctgcgatcaggccgtcgtactcaacctcgcccagcttttcactcagcattttttcagccatcgtttagccctccttcttcgggtggaacaggttcttgaccatcgcacgcttttcggcgtcggtctggttcttgttcttcgtgccagtgccagagacaccgtccggggcagcaccgccaacgctgtttgcgccgctggtatctgcatcatcttcggtatcatccagcagtttgtggcccttcttctttgcatccagcgccgcacggtaagcaagctgctccgcagaacaagccttgtcaccatactttgcctcggccaccagatcggacgggactgcatccgcgatctcgtcaatggcagccaaacgatcacgctcctgcttctgtgcctccgcatgggcttcgtccacaatctctttcaccagatcaggacagccgttgcgcagttcatctgcgttcttgaactccatgtcgttacctccatcgttcttgtccggctttcctgccgggtcagtgttatttacaaaaccctcagtcgtggcaggggccaccacggcgcggtttcgtacaaattcaggggcatcatcaaatgtgcccggaacggcaatgctgttgacaaacagcgcaccattcctgttttcgatttttgcagtctggttgctttccgtgatttcgtcgatgaagccattttcttttgcttctgccgccgtccaccacgatgtagcgtccatccacgccgccacttcttcgacggtgtgtcctgtctttttcgcatactggttcaagacattggtgcgcatcacggtcagtgcatccatgagctgcttcaagccctccatgtccacaaacccgttcgggtttaccttgatggggtggatcatgtaggttgcatcctctgccgccttgaccactttgcaatggctggcgacgatggtcgccgcgctggcacagataccttcgatttgcgctgtcaccgtgccaagcctgttttccaacattgcgccaatggcttgtgcggcccagacatccccgccgccgctgcaaatacggacagtcaggtcatccatagccggaatcgtcgcaaggtctgcggcgaacgcctgcggggtcacttcatcaccccaccagctcgtacggctaatatcaccgtaaagcagaagttccgccgtgccgccggtctcggctgcattgcggaactcccaaaacttcttgttactcggacttgccggggtcgccgccgctccgttgaggaacagcggtttgctgttgcacttgtgctcccgcaatttcgtccacctcccgtttcagtgcggcttcagctttccgctgccgcatatttgcctcatagcttccgcccgtcatctgagcggtttcctgtgccgccgtggagaatccgctgttcacccgcatctgggctgcttcggcttcatccttggggttcaggtttgttcttgccgggccattccagttgcagttcatgtaggccgctgcaaccgccgggtttgtcaggaagcccggcgctttgatccgtcccttgcacacggcttcccggaaccatgcctcatagaccggctggcagaaagaatccgcgaaccagtctcggtgcattcccgtggttctccaaaattcattcaaagcgccgcgggctgcagaatagctggtgctgaactgcttgtacagcacctcagacggaatttccaacgccgccgccatctgctttacaatggcgttcatgaacgcttcaaacccggtcgttgggtgcttcgggtctgcgaactgcacttcctctccggggttcaggtcgataaacgcgcccggtgccagctccacactggtcttatcaggcgtatctacctgcacatccgggggaagcatttcgccaaacggcacctcgtcagattgatccgacttcttgataaacactgtgaacatcgcggagatcaccgcggctgtcagctctgcgtccgtaaaacgcccaagctgtttcaggctttccagcaccggtgccagcagtggtacgccgcgcagctgaccggcacgttcgcgctgcatcagacagagaacattctgccgcccggtctttttgccgtaggcttccactcttgtccagtgcgaggccgtcaatcccgtcacgctggtagacgccagcgggtgccggtcgcaaacccagtacgcaatgaccatgccgtctgcatcggtttcaacaccttgcacgatcttttcaacatgatgctcgttaatgtccgtcggcgaaaggatgtccataaacgcaggagaacaaatgcggtcggcttcgatgatccgcacacgcaggtcatacggtacaccgggcgtctttttgttctgcaggactgcccatgaatcaccattcagcagaaatcccgtaaatgccaactgctgcaacatatagaaattgtcgatgcggtctgcatcacaggtcggcttattggcccacagagcaaattctcttgcgatttgttcattgattttctgggcttcctcgtctgaaatacccaaaaatgcgttgtcgatctgcggtgtcggtgtcagaccgccgcacactacattggtgcgcatggtcttgatggcaccggttgccagcgggacgcccatataagcgtccctgctccgctctctcaggacgcgaagattatcttcgatgtcctctttcgggcttccaccgtgccacatccagccccgcatagatttcttgtgcagacttgcgccatagttggaatatcccgaattgattgcccgtattgccgtctgtgcggcaacacgttttactgcccgctccggggcaatcgccgtgagcagggtatcgaagaatcccatcttctactctccttacaggtcacgcggcacaaaatgccccatccggttccgtccctttctctgctgagaaagttccgtcaccttgttcgaccaataatcaatccgctttccaatctgcgtcaggtctgcgtaggtcaatgacctgttgccgatctggtagctttgcccgtgtgtcaccttttcctcggcggcaatccaaaggtcaagctgtttctgtgccgtttccagcgtaattcctgccatttagatacctcccgaaagctgacgacggccccgtgatttcttgaccggctgggcaggcgttccgtctgcatccggttttttcagcacagggcgagaaatagcaagagccgcggttgcgtaattgcgcaaatccagcggctcgtttcgtttatgctctttatctttgatttcccagtattctttcaaatgacccttgacgaaccgcaccactttcttctcagctgttaggcccttgaagtattcttcggtgtagcctgcttcctcatttgacgggaagtggcagtagttcgggccgggcgtcttgacttccaaacgctgatagatggtcgttttgcccgcatcaacgcccagaatgaacaggtctgcccgaacacgattgttcttggacgggttgcggataaacggcactcctgcgccgcccatgcccttaatggcaaagatgcgccggttgagccgttcctttgcaaaccggtaaacttcatcggtgtggtgtccaccggaatcaatgcaggtcgccaacagcgggtatgccgttccgtctgccttgtgccatgtccgaagtagaaagttgtccagatcgtcccatacctgatccgaaagcatatcgccgaagattttctggtagcgaacgccccagctctctgtgccctcgccccagccgaccacttcaacttcaaagcgatcatcctgcacgtcaacaccagcagtgaggtacagaacatcatccggcacctctgcggcgtagatttcgcggcggttgaacagctcgatgtcctccaactgaatgccgcgttcctcccacgtctcgcccaactctgtgttcacccagaccttcatttgttccgggttgccatgatcgagggcaattttcgcttcgatgaacttcgtcacaatctctttccagccaacaaaggttgaagccagcgtgttcaggtggaagcctctggattctgcaccgggattggcggcaacatacttaccgtatttcccctgctctttccagcggtattcatttgatacacagccgcattccctgcagacatatccaattcccttgtcgaggtcgtctttgtcgaacttgacattctcccaaaggaacggctggtatgccccacattccgggcaaggcacgttccattcttcttgtgtagaaagcaggtaggcgtcctcaatgcggctgtctcccttgatggtgggcgtgctgaccatgacggtcttgtaatcccaaaaggtcgtctggcgtttctttgccagatcaagagggtcgccctctgttcctgcgctcttggggtagcggtcgatctcgtccgccagcagcactttgatggggcggctggcaaggctcgacgggctgtttgcgccaacaatggtgatgtgcccgccggggaagttcttcttcatgacggtatttccagcgtaccggcttttggtatccaccagaccggtaagccggggcgtgtcccggatcatgggagcgatacggtcttttgagagcgtctgccccatgtcaagggtaggctgcatacacatcaccgggcagggtgcatagtccatgtagtagcccagcgggttcagaatgaaagcatccgtctttccgatctgcgccgccgacatgacgacgacagaacggacgtgaggatcaccgatggcatccatgatagcccgctgatacggggctttctcggtgtgccaccgccccggttctgcgctggattctgcggacaacacccggtatctgtccgcccactggctgactgtcaggggcggcggcgggcgtagtttgcttagaacctcggcgaacagttccacggtctgcggttcaagtttcacgatccgttttttcttcacgtttcggttcacctcttacgcaggctgggaacatacacaggatcagcctttggtggatgcgtttgccccacgggcagtgcttgcaagcgccgccgggcttatccggtttcttctccgtcttgttcatcttcttcatcatcctttggcggctgcaacgccacttgataattagaaaattcctccatgatctcatagagggaactttgcaataagtccatgatcttgccctcatcaccgtccagcttggcaatgtttgcagccaacttgttgggcagggcaaggagccttgagcgcaggttcataacaacggtggtcatgccaaccgtgatgtcagatttccggtacagttccccattgcgaactttattctcggtttcggcggcgatccgtttttccttggtcagcttcgcccgttcctcgttgaggtcagctttgccgccctcgtcgccccgcaggtagttgatgtaccgtcggacgctggaacgcaggtcgtaaaggccgggggccttttcttccagcacgccctcgtctcggagctgccgcacccggcgttcggacaggtcgagatactgtgcaacgatcttagtcgtgtacagtttcatcctctgtccctccctccgggtctacatccacctcaccggtcgcccgcatctttgcaatgtcaaggcgttccagttccagagcgtaccgtttttcaaattcttcctgctgacggatttgtgtggtcagggaaataattctgccggagaccttgttcagggcctcccgcagctgggtcactcgaacaaaggcactgtccttgttatccatgaccatcttctgcacagctccgtccgcctgcttcccgtctttgtcctttcccggttttcgcatatcggtgatggatgcagtgaacagcttttccgggtcgcagctttcatactctgcgatccgttccatgatgtgccgctgctgaatccgaagcagcttcaactcataaatgttgttctcgtttgcaccggtcggcatttgatccagccagtcccgttcctcttggctcaaacgttcaaggtgaaccgtgctatatgcaccgtccttctctgcgttggtgtttccgttcggcgcaccgccgccgggattgcccttggcattcctcttgccccggctgtttttgtttccgggctgtcccccgcgcttgcgctccaccgcatcgtcccattggtcaatgcgtttccagttgcggacggttccgtatgtcacgcccagcttttcggcaaggtctttgagatttactttctcgcccgaccgccgccgcttgatgtactcagccttggcggtgtcgcgcttgtcgttccgcttcggcatccggcatcactcctgcaccccgtttccaaaatacacgcaaaagaaaaagccccacgacggaatgtcatggagcttcgcacctatcactgtaccgattatagcaggaaaaaggcatcacgatacatcattttgaaaattttcttcaaaaaatccccctaaattttttcagacccccttctggggaagggcaaaaatccgtttatacctagaaaattttcgggctttcggacccgtaaaggattgaaacgcccctcccagtacctacgggcgcgggggcgggcgggccgtggtcatcggcccggcgccgggcggtgtgcgcggggtcattgcaagaggcggcgcggcgggccgggcggcgccagcgcggcggcgatccgccccaaagcaggccgggcgcggcgtcatcgggcaggcgcggcaaggcggcgggcggtgctggctgctttagggctggcagtgtgcaggcggtgcagtatggcgcggcggtctgctgtatgctggcatagggcaggcgggcggcgctggcatggtatgcagcaggccgggcggcggggtgctggccgctgcaggtggtgcgcggcggggtgctggccgctgcaggtggtgcgcggcgggcgctggctgctgcaggcggtgcagtgtgagcggcccggcaaagcaggcaaaaagaaaaaggccggggcggcggcgtgttgtgcgtcggtcgtcccggccttttctgctgctgttgtcgccccggtgcagggctgtttttgctgtttgccgaagggggtcagattcttcacttaacggcatatcgctgcagtggtaagggttaactaggctatatgccgccccagtaaccccctatagtcccccttcttccccgcttttcacggtttcacggaatcgccgcccacggaatcagcccccggcaagtcgtccagcgtcaacggctggccctcttttgccatacgttcccgcacggcctgtaaaatatatccctgtatgctttgcccggacgcttttgccgcggcttttattgcatttgcttccggtgtcaacggtttcaggtttatttgcgtgcattttgcgttgtatttgtcgttatttagtctttttcttgctgatacagccataatattacccctgtttatttttatatataaaatatagcattttcgcccaaccctgtacagtgtcaatttgcacaaagcacggtatagggttttgtgcaaaacgcagaaagcacggtatagggcttgacaatcaaccctgtaccgtgctagagtagtgccacagcgagcgacacggtacagggttgcaagctgaataagccgaaaggagaaaagccgcatgaataagcactttttcgagctgccgaaagccgtcaagcgtgccgtttgggccgcgctcatggctgaatgggcaaagaaaaaagccgccaaccgcaccaccggttgacagctcgcaagatgggatttgaacagctcatcttgcaatgattttaccagtttccgccggtaaagtcaagcggacactttgcaagggctgcaccgctcaacaaagcaacccatgcccaccaccccgccggggtgattcaaaagaaaagaggttttgaagtatgaccacattcgaccgcaaaataaaccagattgccgcccgccacgggtggagcatcgagaagcagccccgcgccgctgtcccttgctacatcatcgccgccccaacttatgaggataccgggaagatcgttgccgttctgaaccgctgcaagggcttgcaccatgaaacattgaccccgattcactatgaatcgtgggcggtcaaggtgtatgacgctggacagatcgccgcatatcgggaacgcgaacggcaaaaagccgcccttgttgatgctttctatatggcattgaaagccaacggcggcgaccagaacgccgcgaaagctgcccagcgtgaaaaggcggtgcaatggaacgccgttgaagtgtttaatgaaatttacgcatgacccccggataccttgacgggccgcaccacgaaaagcgacccgatcccacgccccgacaatagtcggggaaaagcacgaaaagccacaccacgaaagcaaaaaggagatatgaaccatgaaacgaatcatcaccgccgccgctctggccgctgcccttttggcaggcgcaccccgcgccgctgctgtctgtccctacaccgtcggcccgctgggccggtacattgccccggccattgtgcagggcatgaccgccaccgacgacgggaacgccgttgaagtctggtgcaccgacgcgctggacggtgacgactggttttttaccgtagacaacgaaaccgaattgaagatttacagccgtgtaaatctggtgatcgatgccaacggcaccccggacgacttcaccgacgaccgcgttattgatgccctgttttgcaacgactgcaccgaagattgacccccgccggacaccttgacgggccgcaccgtaaagcgacccgatcccaccaccccggaaacatccgggagaaagacgaacacgaaccacgagctgaaaggaacgaccatgaagaaactgaacgtttacagcgtgtatctggacgacgggaaagacgttttccgcgtcaccgtccccgccgccagcaagaaagacgccgccgaatatgtgcggggcaacggcgacgttgtagccatcaagcccgccgatttgcagggcatcgaccttgacgcactggccgacacactcaagcgtgcccagtggggccagatggaaattgacatcatcacccgcgcacttgccgcttgcggtctggatcgctgaacgaaaggagaacgaaccatgttgaccaaattaacccccatcgagaccgccagcgaaatcatttaccagcggcacatcatccagaagttgcgccgggaaatgaaatacacccgccgccccgatcttgtacaaaacgggatcgactacgcccgacttgcattgaagtgtgcacgccgcggctacctgtacacgatttgattcccgccggacaccttgacgggccgcaccgcaaagcgacccgatcccatccacccggccccgccgggaagaaccacaacaaaaagcgaaaggaagtatttaccatgacgaacaatcaaatcatccgcaacgaagccgcccggcttgaccccgccaccctgcacgccatcgccaccgcgcaccacaccccggacgagatcgccgccattgccgccgcttgcaagaccaccgacgagaacggcaacgaacagcccgccaccgtggccgatgtcgaaatcatgcttgcagccgacgagctgcacacgttcgaccactggaagaaagagggtaagagcgtcaaaaagggcgaaaagcatcttgtttgctgctacctctggaagtacaccacgaagcccagcaaagagcagcgagaaaaagcagcggcagagggtaaggaagcggcccccgatccgcattactaccccacgaaatcgcacttgttcagctgcttacaggttgaaagcagcaagcccgccccggctggccggtttggatcgaccgccgcaattattgagtataacaagaagctggcagccgaacggaaagcggccaaagccgcaaaggaagccgccgaaaaggcaaaggccgaagcccccgccccggtcatcatcgaagaacaccacgagttgccggaactggtgcacgtcgatccgctgcccacgaaaaaggccgcggcaaagaagaagcccgccgggccgaacatgaaagaactgaaaaacgctttcgtcaagaactattcccgcctgtaccagaccgacgacgaccacgaaagcggcgagttttgcgacgccgtggacaagttcgacgagttgagcgccaacgatccccagtttgccgccaccgtccagaagttcaataaatacatgggcgaccttatcagcagcgaccgcgaagccgccgcgtttgtaatggcccttgacgatttggaaaaggcaaagatccccgaaatggttcccagtgtgcagcagctttgttttgcataacacaaaacggacaccccagcagggccgcaccgctcaaagcggccccgccccacttcccaccggcaccccgccgggggatcgtcacgaaacacgaaaaacgaaaacaggaggcttgaatttatgtcttgcatgatgctttcccccgcccacatcgccaccgttgcgcacggtctggcgtatctgctcaatcaatccgaaatgtgccagctttccgccgccgacgaattgcgcgacgctctgggcgcttgcagatacccgcacgattttctgtatgacgaccgccgaatctaccccgttctgtaccggcacaacgaagccgcgtatgaagggcgctataaggcagagccggacgaaaccgacgaagtgccagccatgccggacaatgtgccgcacctgctgcaccgtctggactacaacaagcattattttctcgatgctgatttcttcaaattcctgaagctgcttgactgctacatttaccagtgcgaagaacaggccacggcagacacgaatttacagaaagcgcttgtaaagacttcaaaccacttgtacgcattcgccgcccagcagaatgcagcgtacaacgccgcgccgtggtgcatctgatccgcgccggataccttgacgggccgcaccgtaaagcgacccgatcccagccgaaaggcacaacacgaaacacgaaaaggagcaaacgaattatgacaacatactatcccatcaacgaaaatctggcccgtgcttcccacgatatgcgcagcatgagcacctacccggacggctacgcaaccagagaataccgtgccagcgtggacaaagctgccgctctggtcgaagaaaagaagcagaaagtcagcccatactatcacgaaaagctggacgcgctgcttgacagctacgcccgccgccttgcacagtggacggacgaccacaaccgaaacggtgcaagctgcccctctgtgctggtgtgcggtgctggtaacttcccggtgcggaagaagcagaaacagaacgcccgcgaggattcgctttggtgcgaatatgaagaaatcgaagccatcttgacgaaaatcaaggccgttggcaccggccccgttgatttggccgacccccacgcccgcgaactgctcacggatcagctgaacaaagagcaagacctgctcgaatactgcaagggtgccaatgcctattaccggaagcacaaaaccttgcgcggctattccaacatgagcgacgcggcagccgatgccctcaccagcccggacgccttttcaatgagcctgtaccgcaagccctacggcgattttgagttgaccagtatccgcggcaagatcaagcggattcagacccgccttgacgaactcgacaaagcgcaagcctccgctgcatccggccccgttgaagatcagcacgacggctacacctaccgtgagaacaacgaaatcatgcgcgtgcaattcatctttcccggaaagccggacgacgaaacccgcgccatgctcaaagagaacggtttccggtgggcacccagtcagggcgcttggcagcgccagcttaccgcaaacgccaaatatgcagcgcaccgtgtcatggagtttctggacggcaacgaaaacgaataataaaagcggacaccccagcagggccgcaccgattcaaagcggccccgccccatcttcccggcataaatgtcgggaacatcacgaaaacgaaaaggagctatgaaccatgacagccaaacagcaaagcaccgaatccggcggcggtctgcgcaccgtcaccctcaccgctgaccagtggaacaccctgtatttctaccttctcacttccacgaagtaccgcaacggcgaaattgaagcgtgggaaaggctggcccttgaaacgaacgaggacggttccccaaagttcatccacgccgccgacaatgcgcgttatctccgggatcaggaaaagacgctgcacgaaatcgcacaaagcatctgctgacagaccgccccgccggggtgaatcatgaatcacgaaaggacgaaacgaatgtactacttcatttactgcaaaggccccaacgaaaggcgcttcacgctttgcaatccatggaaaggcacccgcggcatgggcaaagtatatgcgccgcgcttcctcaaggatcaagccgactatgccgttgcatggatggccgagcacaaccccggctttatcttccagcgccgcccggcacgctgaacatcaccaccacgaaaaggagcaacgaaccatgacaaccaacgaacgctttctctcagtcctgcacaggatcgcttcctgccgccacttggccaccgtcaacataacgatctggaacgggcgcattgaagtccggcacaccgttttcgatgaaatgtacatcctgcgcagctttcccctgcccaacacccacaacgaatattgcgcctgcatggcggctgcctgccggtgtctggccgacaagctgctttcgtgggcaagcgagtacgaccacggcaacgacgttctgaacaagcagtacgacaccgtgaacaaagcctttcgcaagcgcttagaggaacaagaatgacccgtgcctcggttccatgccggggcatcttgtgatatactttcactaacgaaattggacttttcaagcacgaaaagttcaattccagcaacgaatttgcaaaaaagggggcatttttacgaacgaagtcgaattttttgcgccttggcgtctggttgccagttttgccgacggcacacgtgccacgttcgacgggctgaccgaggaacaggcccacgccgcaatggaagctgcccagaccgagcacggcgacattggctattggaaccgtgtcacggatgtaaactatgaggacggccagtattgcggcaccctgcaggaaccgcccacggttcatgttgtggatttttccgggtatgacgggccgctggacgaaaacggctttcctgttggcctgccgaacgaaatcgccgagtacatgaagcagcacggcgaaccgcccaccgttccgaaaatcatcatcaagaaagacgaaccataaacgcacgaaatccctcgacggaattacccgccgggggatttctgtttttgacgattcgcaagtttgtttttctgagcggttcggaggtttcgcggaagcccttcattctgcacgcgcataaattcgcttcattctctaccctatagtgtctttccggcacgaattaagatcgctgaagttcgattctaagggcctgtttttgcaggttttctatcaaaaatcaggcataagccattttacagccccttttaatcgcgcgcgtcatacgcgcgtgagagcagttcttcgaccatcgggacttcatccagcatggaacccagaacgaccagcgcgaacttttcccaccgctgggctgtgatctctgtttttctcagttcgcgggctatggttttccagcctttttgtaacgacggatcactgtagacataccgcccgcacaggatcgttttgtaacgactgttcagccggtctaattgcccccggattgttgtctgatccgcacggagaacatcctgccgaacacgaagttcattttcccggcgctggcactccacatcatcggccagtttcacagccagcgacgcggtactatctcccggcgtgctgccgtgcggcataccgtccatagcaatgcccttgatgggattgtagcggtctcgcagttctgccagctcaatgttgacatcatcaagctgtgcttcaatcccgccaaagtagcgcaaaatcattttcgtttcttctgcctgcattttgccctcctacgctccgtaccgtcaaaattctgtcgagaagataggccctgcaccgggcacacgcgcaacctccgtactgccgccggtcatctgggcgacacaccggcccagtttggtatacgccacatactccccgtcttttgcccattcgaggaactgttcatagttttttctggcttcttccacggtgctgttgatctgggcacgatcatagcccatagaatccagcgcttcgatgaagaaccggatcacgagatcaccagcggcacgccgttcggccagcgcgtctttttcacgctgtttgcgcgggtattgtcccgccgggaggacaaacggcttatccagcattggtgctgtgcgctctctcagcttctcgcgggctttcggctgcccatatgcgctcatttcaaccgtgtatacctctgcccggtggttcatttccgtgcaaagccgctcctgcttgtcccggttgaaatctagcgtgtcattggcggcgatcatggtgcagtagctcaccacctcgccaacggcctgccggttcagcgtcaggttctttctggtgtttaccttttcggcgcaccgggcaaaggcattctgtgccatatgcatagacactgcccttgggattcctctgctcatgatgtttcatcctttcctttcggtctgttgggcgcacttcttccatgccttgatttctgctgcagtatcaggggtaatgtgttccacaaagcgccagccccgcggctccgccacaatgtcgatgaacatacggcggcggtggatgtaatcgcgctgctgccgccgggtgaatttgcttttcacctctacaacctcaactgtgccatctgcataagtcagcacaaaatctggggtatagtgcatcgccggtagtttcacattgccgtattctttttcgggcagcatggtaaacctgcggtgcgattccaccttcacgatctccccgcgctggacttttggcagaatcattcccatgtagtagtcgtactcgcccctgctgtcaaactcccgtcctgttttcttggcggctgcagccacggcttccagcgtcggtgcttttgctctgcatctggccgcaatctgtgcttccgcctgtgcccgatactttggtggcaggtcagaaagttccatcctcatactcaaggccggttcctcctgttctgctgcatcccagtctctttgcgatataggcgcacgatcaggtgccgggtgttgttgccggtgattatgggttcgcagtagtgcagggtgtatccggggtacatcttctcccagaatgcacgatcttccagacggttctcgcaaacatctttcaacttggtgcggctcattttcccatcgttcgggcggggcattttcggcggtttcagcccgcggctctgccgccaatggcgcttgcacctcacattcttcatgatgtactttgcaaggctcgtgatgtagccatgatcgaagtgtagaggttcgcaacgggccatgccgcgcccgctccacgcttcctctacaatttcacgggtcagaccgtaaacgcgctgcataatgacatggtgatggtgctttcccacccacaccccgtcaacatacgtcgagtattcatgcacgacgatccacttcgggtgccgaatgccttttttatcgcacatccggtatagctttttcatggcggcggaaaaatccttatccacacgctttgtgtccgccgggtcgggccggtgttcatcgtcataggtgtatgtaacagaataatcgctcttgtggaagttgcgctgaaccaacagctctaaataccgtccactttttcgcaaattgtacgcttccttcgcaatggagcttgccagctcttttttcttgcgggtgctggccttgtgctgctgttccgtgatctcgaaaaaatccacctgcatggtgtcagccgtggcatagtctttgccgcagataaatttttgctctcgtactctgaaacccgcggtcatgctctccacgtcctcctttccgtacacgtcatggaattttctgaatcttgaaccacaaacacgagaagggaacgatgcaaaggaacaacaccgggccgcgttccctacgatcctgcttccggcaagccatcagaacgctgccctcgttttccctctgcactccctttccccgccgggggaaagctcctgtttttctctgatttctcagaatgtcccttagtttagctccgatatacaagccccttgccgcctcgtcagggcggcaatttaacgacggacgctctttatatataaggtaaagggcttgtcttgcttatttcagcagggcgaatttgaaccaatccggcaggtcggatgctgcaataaaatactttaccaccagcaccacggcaagaataatcaccggtgccagcaggtacagccagccgatagcgtaagcgccgaactcacttttcttctttttcatcttcgtctttcctttcttcccatgccgggcaactatcttccgggtctgtgaaatccgcccggttctcggaatttccgttgaagcacacccacgaaaaatcatcgtgccatgcgcaggtggaacagctcttttccatcactcgcgttcctcccagtgccagcaagaactttccggttccgtcactgaccgaaagtgaaggttattgaagcacgttccgtctctcaaatgccacctgcaaaactcacagctttcgtgtatgatgatttttgcgccgcactccgggcagtgcttgagtgcatactcataaacatcttcttctccggtgtctgagtctatttttattcgcttccagccctcaacgtggatgccgcacttgtgacaaacaaattcgtcgcagtctatgtagtcccggttctcgttgtatgtcagcggttgcaggctctccggggcaatggtcggttcggcattcaaactgccctcgatcatctgcactacactggttttgattttcccgtgtgtcagctcccctttcagtgcatactctatgttcttgagtacctgcatgaaatggtttgcatcaaccagacgtttttctttcattttcttttcccgctttctttctgggcgttcgcttcttctttggcaaatccggtatcgtcaccacaatatccctttgtttctccatttccgccgggattgcctcgaccagacttttgaatttttgcaaggtttgaacctccgtcgccgcgaaaatgaactgcgccagttcttccggtgttccctgctggacggaatgaccgtccgggtatgttgtgatcgtcatttttcttcgcctttcagtttcagttccactttcggcatgggctgatccgaacggttcatcggttcatagaaatcgacccactgtccaccctccgggaagtcgtgccacgcaagcgcgtaccggatcgtcagccagacggtttctgcccggtatgctcccttcatggtcgtgtcgatagatgcaggcggaacgttctgcttccaaagtgcgtccatgccctgccgcatctggttacgaagccgcatacacttgagaaaatccgcttcgtggtctttatgaaactgctttcgttcttcggtcgtgtggcaccgcttttccatcttgtccacataatcccagcagcaaacctcattggtgaagtcctcaaactggcccatgcggaaccggaggtattcttcgcacgcctgcttcacggcctgtgctgtctcccggctcatggtgatggtcacggcctcaacctctgccggggtcttattttttgttaccattctgtcacctcaacaaatcctgacagccggggcaccgtagccatcccgtaccagaaccccctctttttccgtaaaaaacattgtcgtcttgaacggaaagtttgctctgtcgatgccagcttcggcagcagcatcggccagcattttgcacgggccgtaatcactcccgatggaaaagccgaaagcttgaatgcttttcgcgtattcctcaatgctttttgccaatgccgccttgaatgtgttcagctgatccagcgtaacgctctgtcgcatcgtatccgcaaggaagcacactgcaacagaggtaaagctatcgtctccgttgctatgcggctggtgatccatcagctttccagcccaccagctgacagccttttcaatatcatcctttgccaaaatcataccgtttccccgcctttctttttcagaggttcaggccccgttccatagtccggcacccagccgcccggccagtcgtgccgctggctgcgttcgtatttcttgaccattgcggccagctgaatagcttccaccgctgcgtggattgccacatcataaatgagattcaggtgctcccgcttcatgggttcgtttctcttgacatctcgccacagccggattgtcaagccaaagtggagcttccgcacctcgtctatcagttcgtccagttcttcccggatcaccgcatacccttcatgcggacttgcgaacatccgaaagcggcggtttgctgccgccagctccttctttgccagagcacggacatcttttgtgataacgtccatggttattcctccgcccggctcttgatttcagccagcagatcatccaatggaacatcggcgaggcaaaacccggcttctccttcatcctcggtagagacccagagtgtagagggaaagtacaaagcggggcgaacaccacaggagtagttgtaccagttgtagtagtaggagccatcggtgttgacgaaccagacgtagtcgtaattgtaggtgttcggagagcaattcggcgtaccgtaaggcgtcgccaaccaccacggcgtatctaccttcgggatcagccgccaatactttccatactgacgcagggtcaacaggccgattctgtattcaacggttccgtattcggtctgtccggttgtgtcctgcaggtcgatcttgaacggaataaaagtatccagcggcgtacccttctcggtaaactctgccagacagttacccagatacttcataacatcgctccggcgcagatcgttgggacactccgggtcgtcgccgtcacggaacggcattttcgtccaaatgtcctttgccagcaccagacaaccgtgttcgtctgcatccagcttcacaaactctttgcccagcgccttgaagatgccgccatttttcacattgcccaaagttgtgcttttcaaaatcttgctcatggtcgtttctccttcttattactcctgctgctcggaatccttttcggcgttcaaatcatcgaacgtctgttccggttcttcctgttcaccgatgtgagtttctgccagcattgcaaccagttcttgcagctttgcttctgcgtagtccggcaccgtatatgccataacggcggctcgtaccctcatgccgttcttcacgacataataaaccgttccgtcggtttgttttctctggtaatagcggataaaaccgttattcttaatttcatcctccagcggcgcaaggtgcgactgacagataatgccgaccatgtggcgatcctcggtcacaagcgggataaggatttctccactgcagtaaataccgatgcccagtttcttcacttcgacttcatccttaattgtgtcgtcaagattgaaaccctgaaaatcaattttgtatgcacagtcgaagtcgttgtaaaccaccttttcgatcatggtatcctcgctgattcccagcatagcgcccatctggttgcggttcagcggacgcgggaaaccggtagcgcagtaaatcgccgacgcagttccaatgtagaaatcatcactctcgtcgttatggaaaacattgcagacaagctgccgcttgaccatctttgtcagccctgaaagtttcatcttttgaccacctccacgtccggtttttccgtttcactaaacctcggataaaaggtcattgcgcacatccgtgcctcacggagtgctgcatctgagctttttgcgtccagcttgtacggtagctgcatcttgtttttcgtgtagctgtcaatgccgaacagcatgatactgaactttgccattttctgctcctttctgctcattttctttcggtgggcacttccgggcttgaaccgggcggggcctattccctatgctcatataaaaaggagccgccgctctgggcggctccaaaagatcagttgatgccgttgataatggggatgctgttaccatcgccaacataggcaggcagttcaccgttccagcgggattccacgtcggtgatcttgtagtattccagcaggttgctgttcagactgtcgttcaaggcgcggtttgcttccgcctttttctctgcaacgtacaactctgcgtccgctgcaaccttagacttttccgcttccgcattggctgcgatcaggtcagcgtccgccgtggcctgtgcttcgacacggcgcttgtcggcgtcagtctcggctttttccttttcctgctgggccttgacctttgcttccaccgcatcggtaaaggtatcagtgaagtcaaaattggttacgctgatatactgcaggtcgatgttgtactgtgccagcacttcccgcagtttcgtgtccatctgggaagcgactgcatcccggttagaaatcaggctgcttgcatcgtagtgggcaactacagctttcaccgtttcaaggacacggggagtaatcagggtgtcctcatactttttgccgacctctttgtagatggtcattgcatttgcctgattgatccggtagccaaccgccacactggtggagacttcctgaatgtcagaactgaacgctgacaagtccatgctcatttcctgaacacggttatccatcttcacgatggactgccacggggccttgaacaccacacctgcgtccttcgtgccatcctcgactttgccaaaggttgtgacgatgccggtataaccggtagggacataggacacacaggaaatgccgataaaaatgacggccaccaccgccgggatgattgcagctctttttgcatcatccgagaaaatcaggactgccagcgcaatcagtgcaaacagtgcgccgataataaaaagaatcatatttcctcgctttcgctcatttgcttatgtacgggcgaaagctgcggtggggtctgatcttggcaggtttggtttccagtggtttataaaaagctcacctgcccctcaatgtttttcttcttcggttctctcggtctatactttttgttctcgtccagaacgtccaccgggttgaactcaaagtgcttgcacttgttcggatttcttatctgcttgccctctcgcatttcgtcttttgcttcgcagtaaatcaaatcgtcgtcattcagaaccgccagagaacaataccggcaatactgtgtcactctttgccctccgtaaaaatatcagtgtacttcgtgtacaccttgccattatggaagtagaggttataatcgcactgggtaatgtaccaccagagcttcttgtgatactccgtcagcagatcgtggaggtggtaggtttccttgtagttttcatctacccgctggcggaaagaaagttcgtcaatctctttgctgcccgccacataaccggcgatgaaaagcacatcctgttcggtcatattgtcgtcaacgacaaataccacgcggactatctcaccgaactttcttttaacgtggagcagatcgtcgaatttatggacgtggtacaccacccgttcaaaccaattaagcgggaagtcttgcacttccgggctatccgggagatagctcgtgtgcatttccaacttgacgtttcgccgctctgccgtgtggaaaagaccctcgtagaatgaccaatgctctttccaatggaacagcggatcgccaccaccggacaccgaaacccactccggcctttccttgcagagcaccttgttgagcggttcctgtgtgctgaaattgtctgtttcgctcattttcagcccattgtttcttacgatgcactccgggcaggtgtaatgacagccaaagttcgtaatgatgctgacatactttccggggtttgcgttgacgctacgcatcggcataactgctttttcatttttcatcttgttcacctatttcattgccccatgcgtcccatccgggcgaccgctggcgggcaaaaagttctatcctcggcacgtcacccagcagcttcacaatccgccgccttgtttcttccggctttttgctatgttcctctaccggggactctataacttgatgtactgcatggttcttgatctgcgccgctggtttgaatccgggcgttactcccagcagacaaatctcggcgttcgctcgtgtatacgctcccatgccccaaaagtttgtgttgctcttccggttcttcttgatccacacaaaggcacaggtcttatactcgaaaccccatgcttccatgacgcgcagggcatcggctatctgtgggaatgtcgcccacatgaagcacaccgaccccccccgcaaggtttttaaccggcagggcgcatatatcatccgtcgtcatggtgttataatgctgcgcggcattgcccctgctctttgggccggttccgcactggcgatatgaccacggaggatcagcatagatcacggcgtattttttatctggcaaattcatttgtttttcctctggtagcaggtagcactccgcaggatgcaggtcgtgtccgcgatcaccgctttgtcgtcccagtattcatctgcgccaactttgcgggaatcgctgccccacgcttcgatccactccggcaagctctgattcacggtatcaaagttcaggccccactctttgcaggctgcaatagctgcgtccagttccttgcccgccctgcaagtccacaggatcaggccagcacccgcctcctgttctttcttggcttcctcgataacgtgccagtttggttccccgatctccgggtatttgctctgacaaatgcacccgtcaaaatcaatggctatcgccctgcgcatttcgtccaccctttctttttctgttcagttcagcaaggtactgcttccgaacatggattgcgatgtgctgcggcaagtaattgcggtaaatctgcgcacagccctgaaacttgtaggcgttgtgcgcgattatcagaactcttatccccagcatcctttctttttcccgcgcttccatcattcctaagatcatttttgcaaaatcttcatctttcattttctgtctttctatccccattgttcggacattgcatttgcaacgcccgtaaatgtttttgctctgttcttggcccggtcagtcgtaaacacacctttgtgttgttgtccatgctttttgctgtaagagccagacggacaccatgttgcaaccggtgtcacaatgtctgttggaaacagcggtggcaaattttttagccaaaggcaggtctttttactgtacgggtgtccatactcatacggctgtatcgtttgcgtgtactgcggcaggcagaaaacgcgacttgggatcggattttctatgcaaatccgtggaacatccgcccaccagaagcgcataaaaagatcgcggccctcaattcctttcatgacacgatctgcttgaagcacatgacctttccaaaggtgtcttgcccctgcgttgctcaggtatgtacaaggcgggtgcgcaatgagcaaatcccacgcatcaatataatgtcccttgtcgttcattgtgacgatttgcccccccgcagagcggttacagcatcgcccagaatgtgccactccgggtgtccgccggacggctcttgaatatcgcatgagtatgcttcatgcccccttcgccgaaaagccttgcacacttcttgactttcctcgcaggctatgagaactttcatcgctcaccctccaagtttcggatcggggcattcccacttgtagtccttaaattgaatcagacgatacgttgcgatctcgccctctacgatctcgatttccttgttgaactccatgcccatttcgtagccgtacactctaaaatccaagttgtactttttggacatttcaatatagggctgctcttcgatattccatgcagctttcatgttcacaacgaggatcgacttcttgccctcttcgcagaagtccacatactcgcctttttctatgaagtttcttctcgtcccctcgatatgagcactcttgtctacatacagatacatttcttcgctgtcggggtcgtgctcaaatcggacagcaccctttacaagctccgtgtgtgcgccgtcgcccagccagttcgtagtgtagcaatgcaggcattcctccacccaccgcttaatatcttccggtttcccgcggactttcaattttccctctacccagttcggcataatttattctcctttcaaaatccacacccgatgctcaccgtacccgctccacgcaagcgcgttctcatgggtatcaacagcaacgtcaaggtgcgctccctgcactcccgcgcccttgtcctgcacaatgcggattcctacaccctcaatgtacaaaaccgtaccgtatggaaaaatggactggtctgccgctacggtgacgcctgcctgtatgggctgtccgctggccgtaattccgtgtccttctccgcagatatgttcgtactgttctgtgcaatatgccgtgcagaaaaatgtacctgcctctgtcagctcgattttcctgtccgctgtttcatcaaggcgaatttgcagagaatcaataacttcctcgtcctctacagcccggtcgatccagttctgtgcacggcttgcgtaaatatcccgctgggtctcaaggtctgcaatacggcttttcagcacgccgacctttgcgctgttgacgatctcagccgcgaagaacaataccagaatcgctttcattttccgtgtcatttctacacctcgctgtcggtcatctttcttccctgtacttcatgccgagaaagtccgcgacgccaaaacttccatcttcgcagcaatgcgtttcatgcataagcggttggttttcaagttttgtcggtggctcaatcccgctggcggcaagcgctgcattagccattgctttccgagctgtccattcgtcaccagttccgccgttggtgaatgttttcccgcacagcctgcacctgaacgtcatgtagtgtcccttcattactttttcccttcttttatttcttgcacgggtggccggaatcgaaccggcttgcctgccgatgggggatcagaacggcggacaacttccttgctacacccgcatatcagaacccaccgcgcaagagagcagcgcggcgggccggtcttggtcaagcagaccttccacctttggcttgggtggatcggacaaggcatttcttcgctcatgcggcgtgcacgcccaaatcggtttccgcactgtcatgcgggcgtagcttggcagaaaggcagcgtggtcttgcaccagcttacacgggagaaacgccgccatacggcaccctctgcccctgccggtgcgccaaattatggacaaacgcaccggcttccatgaatacctgcagcaaagcggcgcgggcggggtgcggccccgcaggcggcttttccttgcgtcgtttcaaggatcagccccgcgccatataaaagccgccgcgctgacgcggtgcgtggcggctcatttacaccttagatgtttttgtatcagcagcacccttggtcttttcgtaacgttcacagttcgtgtcatatccactgcacggcgcacaccgcttgtgggcgatctcgaacgtatgcctgcactgttcatttttgtgcagggctttttcggtgggacttctgttatgtgccttcatttacagcctcaaaaaggaacttcgtcgtagtgggtggcgatcatatctgcaaagtgcagacacagggcttccgggtagcggtcataaacggcgctgagcgttccccagtcctgctttccgctgtaggcacccatgtgccagcggatcgccacgatctcccgcgccgtcagcttgatatactgctgtgccataatgacgcttccttctccgtggcccaccagaccggcgtcaaaatattcgtactcaccgtttcccttatcgcggtactggcccaccttgcaataatcatgcaggagcgccgctgcaagaacttcattccggtggcactttttgaaagcgtgatttgtcctgcacaattccattgccgcctctgccacgcagaccgagtgctcacacagcccgccgggatggttggaatggtgcttgatgctggcaggcttttcaaagaatcccaaagccaccatctgctgccaaaggttttcagcgcccggacggtcagcaaggccgctctccgcccagagaacctcgaacttttctttcggcttcatgtcctcgtacagtttttcgttatccatggttcggctccttttgtttcaaaaattcttcccggcctgccgggtatcttgtcggtctgtcgaaaatctccgggtgcttttcgagcatatccaaaagcatctcccgcatggacgccgccacaaagggcgtaaattcactgctcacgcttccccgcctttccacttgtatttctggcagcgggttttgttttcgttcctcccgccattggaaccgccttgtgtcagttctccggctcaaagaacattgccacaaaggctttcagctggttgactgcagcttctttttcggcttccgtcttggccgtcttttcagcccagcagtccttgaccatttcattgataatctcaaacatactgtctttcagacctgccagattttcctcgtcgtctgctactgccatgaggacacgggccacaataagctctgccgccgtcatcatgccaaccgaaccgccgtgaatgctgacttccagaccgtcagccgttcccacagctgtgatttttacattgcagttcatattccgacctccaaactcagccgttcgacaacttgtcggccagcgccataatgaagtccttgaagcccggctctgtctctgcaaactgccgggccatgcggaaccccaccgtttcgccaacgggaggcttttccttcttctctgccggagccgcctttccctgcgcttccaaatcgttctgcactgcatcaggaattttgtcctgaatcttcttgataacgtacggacgaagcggttcgggaacttctgctacaacgctgcccacgatctggatcgtcaaatccagcagatcaagcccgtttcccttgaactcgaccgacgcaccgctgcccttgacctctccgtgaataaatgcgtatgccatactctttgtcctttctgcttgcaggtaaattttcggatatgggggtgcgccccggagttgacaccgggcggcggggcttgacgctccccgcctgcactggccgcaccatataaaggcggtgtcggacataccgcctgcccatgcgggccgctctggcgtgttctttcagcccttgccagataaggcttcatctcgccgacgccgccgttcttcgcactgacggcggatgatctcttttcccttgcgaatacgctcggtttcttcaaatctccacctgccgtaggacagccccgcggcgtcggcctgccggacatccagcatcagcttgtccggcttcatcttttcggccatttgctcataccctcgtgctccttgttgtgcttgtactccccgccgtgctataatttgaacatataaaatggggagggggtgaatttatgaaatactactttgtcgatcttcgcgcactacccatatctgaacgtatagcagcttgtaagaaaatggaacagtacgcatgggaagtctttgaaaaggttggaacatccggccttgaatccgcagaggtttgctggacatcgccagaggactttgaatcttctccttgttttcctcaaggatgcaaatgcacgcttctgggaaactgatcttacgtctttgtggcggcgtgtgtaataagcaacgccgccggaaagtccgggtcgtagttgaactcgatccgggcttttgctttatggtcaacaaacctcatgaatgccccgatgtcccccaacttctgaaacgcttcttccttgcgccatacaccgatcccgacgccgttgcaacgaacttcttccggcttgtagccgtaatgtttcagaacttcgtccgggtcgatttcatcaaacgtctttttgttcagcgcttctacaatgtgttcaggtttcagcgtcatgtgctccgccctcctgcctttcggattcctgtgcggcgctttccctctgcacaatctcagcaatcggaatattcagaaccaccgacagaccgcccgcaagggacaagttcatccgcttctgacgctctccggtttcgaccatctgataatactgccgcgagattccaatgcggtttgcaacatcctgttgcgtaagaccggccttttcgcgggcttcaataaggtattctctcacctgttctctccctcccttgcaacgtgtcgttgctatcataatagctttgctcctttcaaatgtcaacaatacgttgcattttcagcgtattgcacagtttctttgcaacattttgtttcctctgttgaaaaagcaacaatcagttgctataataaagtaaaagggggatgctcaatggaaaatctgactatcatccgtaaagaatctcacgctacccagcaggaagtcgctgactatctcggtatttctcgtcaagcatacggcaactatgaatccggcaagcgtgaaccggactatgaaacgctcttaaagctcggtgaatacttcaattgcagcatcgactatcttcttggaagcagccgtggtgttcgttatccccttctctcggagtttgagcgtaacctattggagcaatatcgaagcgcgacacctgccattcagagcgcagtttgcaaacttcttgatctcaatggtgaggcttgatagaatccatgaggttcccctgtcaatacaggggaacctccgcgtgctacactctgttgcttacatatccagtgtagcacgcggagccgccatcttttccaaagtcaattcgcctttttactccacaattttacgttgattatcttttattcttcattttcgtaaaatttgcaaaaagaaaaagcccgccgggccgaagcctgacgggctatagatgaaactgtatttatataattcagcagcgatttatgatttttcgtctcacacgttgcgctttcgtctaatctgcgggttaaatgagacgattactcgaaaggacgctcaaggtatggcaaaaagaaaattcaacaagggcggcgaggttcggctggtcgcctattacagatacagcggcggcagcgggcagactgagcaatccattgagggccagcgccgggactgcgaggcctacgcccgcctgcacaatatgaccatccagaaagaatatgtggatcgtcacatcagcggcaagaccgatgatcgtgcggcattccaacaaatgattgctgacagcgacaagggtgcattcgatatggtgatctgctggaaaacagaccgcttcgcccggaaccgctatgattctgccgtgtacaagaagcgtctgcgtgacaacggtgttgagatcgtctatgctgctgaatccaacatttccggtgcggaaggtatcatcattgagggcgtgatggaagcgctggccgaatattactccgccgagctggctgagaagatgcgccgcggcatgagggaaagtgctctcaaagggcaggccatcagccgttgccgcgcccttggcctgaaaacggacgagcacaaacggttcgtcattgatgaaaagaccgcacccactgtgcgctttatctttgagcattacgccgccggggaatccgccatgtctattgttgaacagctcaacgccaaaggactgcgcaccagtcagggcaactccttcaacaagagcagcattccccggatcatccagaacgaagcctatcgcggcgtgtacatcagcaaatcgtatgacgtgcgcattgaaggagccattccggccattatcgacgatgaactttgggagagggcacaaaccatgttgaaactgaaccgtcagctcaaggcaaagaatgaaccaaaagcggactacatcctgtccggcaagctctactgctcctgtggttccctcatgcgcggtatgagtggccacagtgccaccggcgaagtctaccgctactacacctgccccaataaggactgccacctgcggaacatcccgaaggacgatctggaaggaaaggtcatgcagtccatcgtggatcacctcttgcagccggaatctatggaagcactggccgaagccatggtcgaggtgcaaaaggccgacgttgaaaagcccaacgccgaacgtgtagccatcgaacagagcctttccgatgtccgccgccgcagtaaaaacattttggacgccattgaaaacggcaccgctaatgcgcagctgtgcgcccgtctggatgatctgaccgaacaggagcagaccttgagcttccagctttcttctctggaaaaggagaagcctgttgcgttcacaaaagagcagtaccttttcctgctggaacagttcttgatggagccgtccgagcgcacaccggagtatggtcgccgtcttgttaacactttcgtaacaagtatggtagttagcggccgtgaactggttatcaattttaatgtttcggacgaaaccgttaacaaaaacaaaaaaacatcccagacaaacttacaaaaagaaagttcgtctgggatgcgtctggtccgagtggcgagaatcgaactcacggcctcttgaaccccattcaagcgcgctaccaaaactgcgctacacccggatatctgtttgcgtttgccgctcacagcttgattagtatacccgacttttcccgttttgtcaagcgctttttccaaatttcttatgccgtttttacattttgctttcccggcctttgcccgccgaagggatgcgcgaaagagcgttattttcaaaaatcgctatacacatcttcctcgtcatcctcgcagatcggggtggtgtcgtccggcggtgcgccaaactctaccgtggcaaaggccagcgcgaacacgctgtctgccccggcatggagcagtgcctgtgcgcaggcggcagcggtcgtgccggtggtgatcacgtcatctaccagcaggatgcgcttgccctccacctgctgcggctgtgccgcccggaacacgcctgctacgttggccatgcgctgctccagcggcagaccagcctgatgccgtttggcgcgggtgcgcaccagcgcctgcggtgccagcggcacctccatggcttttgccagcggcagcgccatcagttccggcacgttgtagccgcgctttttgccggaggccggcaccggcacgatcaggtcgtacccgatagctgcccacggcaccggctgcgggagcagctcgccgtactgtacggtcagttctccgccaaaggccagctgcaccagacggttgcccatctccacagcccgccacggcttgccctgatactttgtgctcaggatgccgcgccgcacacagccgctgtagcgatagggcgcagctgcaccggccagattgctgatatagtgctgcgccgggtccagccggatacccggcttgcggcgcagcgcttccagctgctctgcgcagtccgggcaatcccgtacatctcccagcacccggccgcagaaggggcactcacgcgggtagagcagctgccgtaccgcccgcagcgccctgcgccgggggtcatagtagtccatcagtcctttttgactgccacgatcacccgcacgcgcttgcctgctgcgcagccaaagttatcgtaccagccggtcaggtagtagccctcggagttcacctcggaaagcttggtggcataatactgacccttgtaccacaggtacacctgcatatcgtcagccgtctcgtagcgggtgccgttgctcatcaccgatgctgcgcccaccttgtcgatcttcatgggcatcagctggatcatggcctttaccgtgccgttcacgttctgccgcactgccagaccgcccgccagcaccggatacttgacggaggtggaaaagctggcctgactgccgttgacgtagcagatataagtagcgccgccgcccacaaagttgaggatggtgctcatgggctgaccagtgatatcggccagctgcttgagaccgatgctcagcagcgaaccggagctgctggtgatgcggttccagaccgtgctcagcagcgagccgtcaatgacgccccacaagatctcgctggtggtgggcaccagcacactgcgcagatcatccgtcaccgtcgtggtgttggtggtactgccggtgctgccggagctggaagagctgttcccggaggaactgctccccgaaccggaggagccgctgccggtcagggtgcccagaatggagctggcgttgacggccagattcttcacatcgtccagcacgccgtatttccacaggtcgccggtgacatcgttcaggatcaggcggtcgatctgcccctgctcattcagcgtatagtagcgcacggtcagggcattcagctttgtccccgctattcggctgggacgaaccgtcccagccaacccctccgatgtcgtatccagaatttgtacgtcatcggccagagcatagtcccccagcgcggtggcggtgtcgttgatggtgccgctgaccgatttggactcgatggcggtcacctgctctccctcgggggtcacgctgatctccaccagccagccggtgggatagttcaggcttttgtcgatgttcacggtgcggatgatgccgtcggtgcacatcaccgagatcttttgcagcacgtctgcgccgttatcctccacaaggctgcgggtggcggtctgcaccacaccgtagaacacactgtcggcttcctcgccggtgatcacatcggccacctcgttgtccatgcccagcagcagggtgactacttcgcccacgccgccgccgttcagggaggagatcttggacgccaccgcagagctgcccagactgtaggtgctgcccgccacagtcagtgctgtgggtgcgctggcgctgggcgataccgcggtaatgcggcctgcggcgcggcgggtatagatccacaccgtctgcaggctttcgctgtaatagtacacatcgtacttgttcagctctgccgaagcggaggtcttatcgttgcggtagacgctcaccggcgtaaagggcagctgggtgccctcctccgccacaaaggggcccttgcggctcttgagcagcaccgaggaggtatccacctgaccgttggacaccgtaaagcccagcgagctgccgtaggcgctgccgctggcggtgttggcgcgcagggcgttgtacaacagcagggtgcactgctcgtaggtcatagcctgaccctgcgtacaggtcagctgatcccgcagaccgatctgctgcgccttgttcagctgtgcctgcgggaaggagccggtcaggtcggtggtcttatagctcagcagcttcagcaccgctgcacaggcttcctccagcgtgacggtgttgtccgggcggaaggagccgtcggtgtagccgttcatccagccctgctgcaccgcaatgcggatgtagggtgcccactgggaggtgccgggcacatcccggtacaatgtgcccacagttccctgcgcgtccacactctcccggtaggtggaaaaggacaccagcattttggcaaaggcaccgcgggtaacgttggcgccaagctcctgaccggtgggcacagcgcccagagtgatagccgtctgcagagccgtattgttgatgctggccgccgagaccggcagcaccagcaccgacaccgcaatgctgaccgccagcagaaatgcgagaatccgttttttcattggtcgtacctcttgttctttgtttatcacgccgccgcgctcaatcgtagcgcaatgcttcaatggggttcagccgggctgcgcgccgtgccggcagataaccgaacagcacgccgatgcccaccgagatgccaaaggccaccacaatggagttaaaggaggggcttaccgtaacggtggtatcagtcatgaacatgggcagcaccctgttcgccaccatggacattacatagcccagcgcaatgcctaaaacgccgcccagcgcagaggtggtagctgcctccaccacgaactgcgccagaatggtgcgttcctttgcgcccagcgccttgcggatgccgatctctcgggtgcgctcggtgaccgacaccagcatgatgttcataatgccgatgccgcccaccagtagcgagatgctggcgatgccggtaagtatcacgatgaccatgttgatcatcttgttcatttcctccagccactcgctggcactgtacacatagtagccgttttcacttttgagaagcgcctgcagttcttcctccatggtcgctttcgtctcgttggcaaggctttcgtcggccatcatggcagtgtagcagtccaccatgctctggctggaaagccgcatcacggtggtgtagggcagataaacacagtcatcgtcgctgccctgctgcatggtagggtcgctgaccttggcagacagcacgcctacaacgcggaacttgttggcaccgatcttgagggtctgtcccacgccgttgccgccaaaggccacgcggttgaggtaatcgccgatgacgcagacctgcttgttgtcctgcatatccatgtactgcaggccgcgcccctgaacgatctggtaattcttcatgtcggtaaagttctcgtccacaccgctcatattggaccagcggtagctggtggtaccgatcttcagcgtaccgctggcgctgccgctgaagttgacctgcggcgacaccgccttgatcagattggaatgccgctggcagatgtcgtacatctcctccaccggcacggtgcgggagccgtagccccacacctgaatgctcagggtgttggtgcccagcgcggaaaagctgtcccgcatacttttggtcataccgttgcccagacccacgatgacgatgaccgccatcacgccgatgatgatgcccagcatggtcagaaaggtgcgcagcttgttgctccacacgttctggatggcctgccggaaggtttcaaagatcatgcctgttcctccttttccggcgtttcgggcagcagggtgggctgcaccatggcctccggtgcgtgggagtcgccgtcatacaccacctgaccgtcctccagccggatgatgcggtcggcctgcacggcaatggagttgtcgtgggtgatcagcactacggtgtgtccctgcttgtgcagctgctgcaaaagccccagcacctcgcggccggtatgggagtccagcgcgccggtgggctcgtccgccagaatgaccggcgggttgcgcaccagtgcccgcgcaatggacacacgctgctgctgaccgccggaaagctggttagggcggtttttcagcttgtcgccaagccccacctgctccagcacctcccgggcgcggacatggcggtcggcgcgggagatgcccgcatacaccagcggcacctccacgttttccatcaggttcagcttgggcagcagattgtactgctggaagataaagcccagcatctcgttgcggatggcggccagctcgttgcggttcatcttgcccacatcccggccgttgagccggtaggtgccataggtaggcacatccagacagccgatgatgttcatgcaggtggatttgcccgaaccggactggcccacgatggccacgaactcgcctttttcgattttcatggtgatgtggtcggcagcctttaccgtggtatctcccatctggtaatacttgcacaccgcatcaaactcgatcagagcgctcattcatccctcctgcgtcaattcaccacaactgcaccggcctcagcggggtcaatgccttctgccggctcttcagcgtccgctgcgggttcttcggcgttttccgtctcttccggcagcatttcctcgccgcccgcggcaacatctgcggcgttttcggtaccgccgatcacttcaccgtcggagtagtcgtagccgccgtcgtcatagtagctgtcgctgctcacggagctggggtcgtaggcgatggtatcgctctcggacaggccgctggtcacctgcgtatagttgtcgtcgctgacaccggtcttgacctggacatacacatagccctccggtgcgctcatggaagcatcagcattcacggcactgggcgaatcctgccgcaccagcacataattgccgcgcacgatggcggcattgggcacggtaagcgcatttttggcctgtgccaccacgatctcggcgttggcgttcatacccgggcgcagaccatcggtctcgtcaatgcgcacggtcaccgggtaggtggtggtaccgccgctggtatcacccttcatggacacacgggtgaccagcccctcgtaggtcttatccttcacggcgtctgcagtcacctgtacggactgccccaccttcaggctgctgacctgcagctcgtccactttgatagtcatttccagatagctcaggtcgtagatggtgcacaggtcgctgccggtgctcagggcatcgcccaccttggcatttttctcgatgatggtgccgctgatgggcgaggtgatggtgtagttatccatggtgtcctgcatattctgcatggacagttccgcaccgcgcagggtctcggaggcagactggatggactcggtcagttcctcaccgctgagggtcaggatgatgtcgtccttgttcacgttgccgccctcccgcacattgatggcggtcacggtgccggaagtcagcgcagtcagggtgcgctcggcctgatactggaagttggctgccgcaatggaactgaccccgttgacagtagccgtagcagcctgtgccgtggtcagaccgcccgcgttggacaccgcaatggtcacagtgcgggtgagcaggttgccggtgctcagggcatcggtgccggtcacggcggtaatggtgccgggcagcacctcaaaggtgccgtccagcgtgacctcggcggtctgccctaccgagaagttggcagcatccgcagccgggaactccagcaccagattcatcttggagctgtcccgcaccacggccacctcctgaccgctctttacctcatcgcccttgttcaccttcaggctgctgacgacgcccgccacctcagcacggacatactggcggtctacggtcttatcgtagctgcgctgcgcctgctgcagggtgatggctgcctgctccaccttggtggtagcgtcggaggaatccaccgtgtacagcacagtgccctcttccacgatatcgccctcttcaaagctgccggtcagcaccttgccggacaccagcgatttgacactgtaagtattggcgggattcaacgtgccggtgacgctgagcgtgttggaaacatcccgggtctcgggcatgacttccgtataggaagtatccacgtttgcgggctttgcgctcttgggcttcagcagccaccagccgcctgccagcaccacaatagctaccggcaccagccacttccagttcttttgggcaaatgctgccgcgccgccttttttcggtgcagccactgcgtcctgctgctggtcggcgggctgtttaggtttgttccagatcattcttgccgttcctcctaggttcttttatgacaagatgcttttttgtaaaaagcatccatcagaaactcttatttgtagtgtatcgcattttgccccgataaacaagcgtccaattttcgtttcacggcatttccacaaagtttcagctttttttaacaaaaaggctgctgcacaaaatcactgtgcagcagccttacgggtaattatattacagcggctcagacctcaaagttggggtcgtccttcagcatatggatgttggacataaaggcgctctgctcggggtcggtgaactcggcatccttcacatacttgttcagcacagctgcggtgcgcacggggtcggcaatagtgccggcaccgccgatgcagccgccggggcagcccatgccctccagcaagtagccgttgtacttaccggccttggccagcatcagcagctttttgcagtcggccagaccctgtgcggaggcgatcttcacctccatgtcgggacgccattccttgatcttgtcggcaacggccttggccacgccgccggactgtgcaaagccgcggccggcagcagaagcgtagcacagatccatctcggcgggatccacttccagattgtccagatccagatcctttgcctcaatgatacctgccagctcctcaaaggtcagcacgaagtccacgtcggagcggacggtgcggcgggaggcctccagcttcttggcggcgcagggtccgatgaagcacatacgggcatcggggtcggcctgcttcatcatgcgggcggtgaacaccatgggggtcatggtcatggagatgttcttggcaaggccggggaaggcggtctttgccatcatgctccatgccgggcagcaggaggtagccatgaagtccagcttctcgggcacttcctcaaggaagtcgtgtgcctcgtccacagtgcacaggtcggcgccgatggcaacctccaccacgtcgcagaagccgatggccttcagggcagccttcagcttgccggtggaagccagagaggggaactggttgataaaggcgggagcgaccagcgcatagatgcggtcgccgcggttgaagccctgaatgagctgatagatctgacccttgtcggcaatggcaccgaaggggcagttcaccagacactgaccgcaggatacgcacttgctgtaatcgatctcggcacggcccagctcgtcagagtggatggcgcccatgccgcaggcagcggcgcagggacgctcggtcttgacgatggcattgtaggggcagacggtgacgcagcggccgcacttgatgcacttgtcctgatcgatggtggaacggccgctctcccaagtaatggccttcttggggcacacttccatgcaggggtgtgcaagacagccctgacacaggtcagataccttgaccagcttttcggggcagcggttgcaggcaaacttgatcacgttgaccagcgggggatcatagtacttatcggcgatggaggcatcctccagaccggagaccacgctgttgtgctcgtccatgcggcgggtgggcagacccatagccagacgcacgcgctcctcaacgatggcgcgctccaggaagatgtccttgcgcagcttgccctcctcaccggggatgatggtgtaggggatcttgcgcatcaggtggttggcctgctcacccttgacattggcgtaagccatgcgggcgacctcggtaaacacctgacggcggatctggatgaccgtagtattgattcctctgaaactcattccaatctctccttgctcagaaacagccaaaaaacggagccgcctgccctgtgtgcagagcataaaaacggcgctatacgggcgcggatggtaccgtgctggttgcttacagcacgccggacccgataaatccatcttcattttaacataaagacgtgcgtatgaaaagggcaaaacacaaaatttgttaaaaatttattgtattcatgcggatgcacagaatgtacaagtaaaatgaaaaaatttcagcaaagtgctgcacgcacccgctcgccgtcgtagtggcccagctttacccgcacgatctgcccgctctcgcagccgggcgcagagaccaccaccggaatgtacagccgggtgtagccggtgaacagcgtaccggacaggggcgtttccagcagcacctcatcctcggtgccctcaaaggcggccagtgcctcgcagcgcacctgttcggctacggcgttcatgcggcggctgcgctcctgcttttcccgctcgtggatctgatccgggaaatcataagccggggtgccgctgcggcgggagtaggggaacacatgcactttaaggaagccgatcttcttcaaaaatgcgcagctctcctcaaagtcctttgccgtctcgccggggaagccgcagatgcagtcggtggtaaagctgaccgggcggctgccgtaggcggcgcggatctgctccaccacctgtgcgtactcctgcgcggtgtacacccggcgcatccggcgcagggtggcggtgcagccgctctgcaaactcaggtggaactgggggcaaagcttgtccaccgctgccaagcgggagatgaattccggggtgagcatatcggggtcaaggctgcccagacggatgcgctcgatgcccggcacctgtgcgcatttttccaccaattccacaagattcgtgccggtgtccagcccgtagctgggcagggagatggcgctgagcaccacctcgcggtagcccgcagcggccagctggtgcagctcggccagaatgctctcctcggcgcggctgcgcaccggcccgcgggcgcgggggatgacgcagtaggcgcactgccggttgcagccgtcctctaccttgataaaggcgcgggtgtgggtctcgaaccgttccaccggcagctcctcgaactgctcgccgcgctggtgcggggcaatggctacgatgcgctcgtggccgtccaacagcttttgtacgttctccaagatggccttgcggtcgccgttgccgcacacaagatcggcctccatgaactgtgcggcctcctccgggaaggcctgcgggtagcagccggtcagcaccgtcaccgcaccggggttttcgcgctttttgcggcgcagccacttgcggctcttctggtcgccgaagttggtcacggtgcagctgttcacaatgaacacatccgctgcttcgccttcctgcgcaatggtaaagccgttggcgcggaacagctgttccagcgcaccggtctcgttcaggttgaccttgcagccgagggtataaaaacaaactcgcatggggaacgatcctttcgataaaaacgggggtgttttgcatttcttctcattatataacagaagcccaccggggtgcaagactgtttttgcacggagacaccggtcttttgcagtgcgtcaaaacaaaaagggacgcgaaaaatctcgcgtcccaaagctgcaggaaggaatgacgagccgttagctgtttttcagggtaacgaacagataatcggtctccttgccgtccagtgtatcggtcttgcgctcaatgaaatcgacctcgtacataggctggcgaagctgagatctcacaaaagcgttgatggcgttcttctgggcgtcctcgctcaggtcggccacgacagaaaactgctgggtgtccagagccttctgggtctctttaccgatcacggtagcagagaaccggacgggcagcatgagctgaccggagcagccggtgaacagggcggcacctgcaacagcagcagcggacagaccggcgatcttcataaagttacggcgggaaagattcataatgagaccctccttgtgattgcatgattgtatgaaactgggcttgctcccttctgggaacagttcaattttacaagttttgccgtgaaaagtcaaggaacaggtaccaaagttaacagaaaacgaagacaatatgaaaaatggtacggcaaaattgacgagcggcatgcctgaaaagaccactgcatacagtagcagcaagagacttcgcacggggagggacggaaatggaacggagaaatctggcgctgctgtgcgcgggggtggtctgcttctggttgtttgcactgactttcggcacggcgcagggcaaggggctgcgcatccaaccggcggtgcaggcgcaggcggaaccggcagtgcagaccctgacggtcaccccgccgcagcttactctgccctgccgcgcggcgatgctcatcgaccagaccagcggcacggtgctttacgagatgaacgccgaccagaccatgcccatcgcctccattaccaaggtaatgaccctgctgctcacctttgaggcggtgcacgccgggcggctgactatggacaccgccgtgccggtcagcgagcacgcctaccacatgggcggcagtcagatctggctggagcccggggagcagttcacgctggacgagatgctcaaggccatctgtgtgtcctctgccaacgatgcagcagtggcggtggccgagcttgtgggcggcagcgagcctgcctttgtgcagcagatgaacgcccgcgccgcagagcttggcatggagcacaccaccttccgcaacgcctgcgggctggacacggaggggcatctttccaccgcacgggatgtagccatcatgagccgcaccatcctgaccacctgcccggaggtgctgcactataccggcatctggacggacactttgcgcggcgggcagacccagctggtgaacaccaataagcttttgcggcgttacaacggcattaccgggctcaagaccggcaccaccggcggagcgggcgtgtgcattaccgccagcgccacccgggacgggctgaacctcatcgcggtggtgctgggtgcaccctccagcaaggaacggttcgaagccgccaccaccctgctggactacggctttgcggcctaccgcgccgcaccggtgcccctgccgcaggagcgcccgctgcaattaaaggtaaagggcagcaccgaggagaccgtgccgctggattacgccgctctgccgcagaccgcgttgctgcccgccgaaagcgccggacagctgaccgtgcagctggaactgcccgacacgctggaagccccggtgacccggggacagacggtaggcaaggcgcagctgctgtgcggcgaagcagtacagggggagtacccggtgtgcgccgccgccgatgcgccccgcatggagtttgacaccgccttgcagctgctgtgggacagcctgcgggggacagcagcctgaccctgtgccgaaaaaggcgcttcagcgcacaaaagtgcgccggacgcccggcagagctgttggatacctgaacaaatatggatgaagaaacaaaaaaacactattaaaattgtatgaaatctaaggaatttgaccttgactttacccggagggaacggtacacttataccaagatatttcctcgcagggcaaaggcccggcagatcgtttggaggttttaataaaatgagtgtcgcactgaacacgaaacacctctccagcttcatcagcgaagaggaatatgcagctatctacccgcaggtagaagccgcccacaagcagctggaagccaagaacggccccggcagcgattttctgggctggatgaccctgccccgggattatgacaaggaagagttcgcccgcatcaaggcagccgctgccaagatccgccaggactctgacgttctggtcgtggccggcatcggcggcagctatctgggcgcacgcgctgttgtggaagccgttaagggtatgtatcacaacgagctggaagatggtctgaagatctacttctgcggcaacagcatcagccccacctacctgaacaacatcatcagcctgtgcaagggcaagcgcttctccatcaacgtcatctccaagtccggcaccaccaccgagacctctctggccttccgtgtgctgcgtgaactgctggaaaaggagatgggcgtggaggaagccaacaagcgcatctacgccaccaccgaccgtgccaagggcaccttgaagcagctggctgacgcacagggctggcccaccttcgtagttcccgatgacgtgggcggccgctactccgtgctgagcgccgtgggtctgctgcctatcgccgccgccggcatcgacatcgatgctctgatgcagggcgctgccgacgctatggagcgcttctccgtgctgagccccgataacgatgcttacaagtacgccgccatccgcaacatcctgtaccgcaagggcaaggctgtggagatcctggagtgctacgagccggacttcaccctgatgaacgagtggtacaagcagctgttcggcgagagcgagggcaaggacaacaagggtctgttcccctcaagctgcatcttctccaccgacctgcactctatgggtcagttcattcaggaaggcgcccgcatcatgttcgagaccatcgtggacgtgaagaagcccgcgcaggatctgttcatcgacccgctggagggcaactttgacggcctgaacttccttgcaaaccagaacatgagcgtggtcaaccgcaaggccatggagggcaccattctggcacacaccgacggcggcgtgcccgaagtgctgatcgaggtggacgacctgtctgcttataatgtgggctacctgatctatttcttctggcgtgcctgcgcctgcagcggctacctgctgagcgtgaaccccttcaaccagcccggcgtggaaagctacaagaagaatatgtttgccctgctgggcaagcccggctacgagggcctgaccgcagagctggaagcaaagctgaagtaaaagccgaacgtaaaaaatgatctcccgccgcaaggcgtggaaaatacaggaggactgaactatgattaaactgattgttggtaccaagggctccggcaagaccaaggctatgatcgaccagatcaacgacgcggtcaagacctccaaaggcaatgttgttgttgtggaaaagggcatgaagctcacctacgacatcgctcctgcagcacgtctgatcgatctggacgagtacaagatctccggcggcgaaatgctgtacggctttgtggccggcctgatggcaagcaactacgacatcaccgacctgtacattgacggcatcctgaaggtgctggatcacgatatcaaccgtctgggcgttgtgctggatgagatggcagccattgccggcgacagcgtgaaggtcaccgtgaccgtcagcgcagacgaggccgcactgccccacgatgtgaagaagtacctgtaatctgataaaagaacagggctaaaggcttttccaacaggcagaagaccggagaaaaataaattttttcggttttctgcctgttttggtgttgacaaagggttgctttggcgctatactaacaaagcagccttttcagaggtgtactatgcaatttgacctgagaaagtttatcaccgccggcgcaagaccgtaccatgcagagtttcagtgtgatttatctgcgtacaattatgccggtgcaaggatcccgcagccagtcacagccgtctttgacgcgcagaccgatggcgacgaggtccagataacattgcgggcaaaggcattggtgcacggagagtgcgcccgctgtttggacccggtcacccgggaagagacagtcgatacggagtggatcgtcaaggagcgggatctggatgacccggatttcgatcttccgctggatgaaaaaggacacttggacgtggacgaatggctcaatcaggagtttatgttccagatccccacggtgctgctttgcagccccgactgcgccgggctttgcccgcagtgcggtaagaaaaaggcggaatgcacctgcccaccggcagagcagaccgatgcccccgtagacactaggctcgcgatccttaaatcactgctgaacagataaacccatcaaggaggtgcaaaaatatggcagtacctaagagacatctttccaaggcccgccgcgacaagcgtcgcagcaatgtttggaagctggaggcccccgcactggtgaagtgcagcaactgcggctctctgaagctcccccaccaggcatgtggcaactgcggttactacaagggcgaggaagtcatcaagaaggcctaatttgcgcgtaattggtggcataatggtgttatgtacagaaggggagggcgcaaagccttccccttcttgttctttagaggaggtggatgcagatggcgatacggatcgagcaggtagatgccggcagcgaagccgaagctcttggccttgcccccggtgacgagctgctgagcgtggacgacaacgagctgaacgacacgctggactacgatttttataccgacagcagcagcttccacctgaaagcccgggtagcagacggcatccgggagtgggaagtacagcggccgcagcgcggtccctttggctgcgggttcaagacctatctgggcgatgcaaagcattcctgctccaaccactgtatgttctgcttcatcgaccagctgccccccggtatgcgcgagagtctgtatttcaaggatgatgacgagcggctgagctttttgttcggcaactacatcaccatgaccaatatgcaggatcacgagatcgaccgcatcatcaagatgcacatctcccctatcaatatctcggtgcacacaaccaaccctcagctgcgggtgcggatgctggccaataagcgcggcggcgaggtgctcaagtacctgccccggctggtggagggcggcattgccgtcaactgtcagctggtgctctgccgcggcgtgaacgacggcgacgagctgcgccgcacccttgccgacctgctggaactgacccccatggtgcaaagcattgcagccgtgccctgcggcattacggattaccgcaaaaatctgtacccgcaggtgccctacgatgcaaagaccagcgccgaggtcatcgacattatggaagagttcggtgatgaatgcaagcgccgccacggcaagcgcatcatctaccccagcgatgaatggtatctcaaggcaggccgtcccatccctgcgccggagttctacgaggactacgaccagctggaaaacggcgtgggcatgatgcgcctgttcgaggaagaatttctggccgagctggacaagccccaccgggtctacggcaccaaggagctggatgtggtcaccggcaccatggcagcgcccctcatcacacgcatgatggaggagctgcaccgccagtaccccatgatcaccgtgcacgtccacaccatccagaaccgctttttcggcggcaatgttggggtgaccggcctgatcactgccaccgatatcatcgcccagtgcgctggcaagcttgccacaaaaacgctgggcatcccggctgtgatgctgcgggaggaaaaagataccttccttgacgatatcacggtggagcagctgggggagcagctgggcgtaaaggtggaggttctgcccacagcaggcggggacgaagcccgcgctttgctgcgcagcggcctgcacattgcccgcagaagaaagagcggcagctgataacgccatttttattgtattttaccccttttaagaaaggaggagaccccatgagcaaaccgatcgtagcagtggtgggacgccccaacgtgggcaaatccaccctgttcaataagctgtgcggccagcgccttgccattgtggaggataccccgggcattacccgcgaccgcatttttgccaactgcgagtggaacggccacgagtttttgctggtggacaccggcggcatcgagcccaaggccaccgagggcattcttgcccatatgcgtgagcaggctcagatcgccatcgacaccgccgactgcatcatcatggtcacggacgtgcgcaacggcctgaccgcagccgacgaggacgtggcgcatatgctgcgccgcagccacaagcccatcattcttgccgtgaacaagtgcgacaaggtgggcgaagctcccatggagctgtacgagttctacaacctcggctttgacgaggtgatgcccatttcttccgtgcacggtcacggcacaggcgacctgctggatgcagtgtgtgcacatctggacttcagcgagaccgtggtggaggaggaccgcatccccgttgccatcatcggccgtcccaacgtgggcaagtccagcctgaccaaccgcattctgggcgagaaccgcatgatcgtggctaatgaagccggcaccacccgcgatgccatcgacaccccggtggacaacgcctacggcaagttcatctttaccgataccgccggtctgcgcaagcgcagcaacatcagcgatggcttggagcgctacatggtggtgcgcgcactggctgctgtagagcgcagccgcgtggcgctgatccttgtggatgccaccgtcggctttaccgagcaggacagcaaggtggctggctacgcccacgagcagggcaaggcctgcatcattgtggtgaacaagtgggatgccgtggaaggcaaggagaccaacaccatggagctgcagcgccgcggctatgccgagtgcttcagctttatgggctacgcacccatcatcttcatctctgcccagaccggctacaacgtgaacaagctgatgcagctgatccgggatgtggacgccgagaacggtgcccgcgtacccaccggtgtgctgaacgagatgcttgcccgcgctaccgcccggatgcagccccccagcgacaagggccgccgcctgaagatctactacctgacgcaggcctctacccgtccccccacgttcgtggccttcgtgaacgcaaagcacctgttccacttcagctatcagcggtatctcatcaaccagatccgcgaaaactttggtctggagcatacgcccattcgtctggtcgtgcgggagcgcggctccggcgaggtgggtgccaaggacgtataacacgtcaggagggctcagatgatggaatctgttctcatcgctgcggtgtccgccgtgcaggcatacctgctgggcagcatcgacaccggtatcctcgtcagcaagtttttgtaccacgatgatgtgcgcaagtacggcagcggcgctgccggcatgaccaatatgctgcgcaccttcggcaaaaaggcagcggcacttaccgctttcggcgatgtgctcaagggcgtgctggccgtgtgcatcggccgctggctgttcaccctgatgccggagagtaccacgctctcgccgtatcttgcggtgtatcttgccgccatctttgccattatcggccacttgaagcccctgtatttcggctttaagggcggcaagggcgtactggtggcgggtggtaccattctggccatccagccggtgctgatcccctttctggcggtcatctttctggcctgcctgctgcccacgggcatggtatcgctgggcagcgtgaccatggcggcactctacccggtgctcaccatcttgtacggtgtgttccggggctactccgccgccgatcttaccgtgtgtgccatcggctcggtgatcatgggcgcgatggtcatttatatgcaccgctccaacatccagcgcatccgcgagggcaaggagtaccgctttggccgtcacggcaaaaagtaacctcaaatagcactacgccccgcagcggctttctatcagccgctgcggggcgtttttgtcagacagccgtcaatggcaggccgcggcttttccgcttttccaagctctgtgacggattcgaaacatttttgtgaaagactgccaaggcgcattgacaacgccgtccggtcatgttatgttagtattgacaaatcagtaccttatagggcattatatactctgtttcaccatgccgcagctgcggcagaaaggataaaaccatgaccactgccttaaaacgtaccggcgctgccctgctgacgctgctgatgttctgtgtgctcacactgggcgcttctgccgcagccaatacccccgttggggtcaaattctggaaggaaaagtccgataaggaatccatggccaactctggcatcgattctgaccgcgaagccacccttacccgccagtccaacggcacctacaccctgacgctgcccgtcaagcaggtgaccaagctcaacgtgaccggctacctgtccggcctgaccatcggcgatgtgacctacaccggcaccctgaccggcgatattgaaaagggcaacggcatcctgaccatcaaaaacctgcctgcctcagtgctgaccggcagcgaggtgggcaaagcgctgaccgtgacctgcaatatccagatggatctgagcctgctgggcgagatcaacaccaccgcccggatgtgcatctgggcaaaataagccgcacgataacaaaaagcgccgttccacccgggacggcgctttttgctgttcagcagtcgatgtgcttttccacaaaatcggtggccatcttatccagctgcatcaccgcgttttctgcgcccttcatcaccttgcgcacgttgcggcgcatctggcgcttgctctgggtggccatcatggcaccggcagcccccagggctgcaccggcggccatgcccactaccatgcctgcggcagaattttctcgctgtttcattctgaatttctcctttcggcctgtcatgacagggcttgcagtgctattatttccgcaaaagaatctggtatgcgctttttttatgcagcaatttgtggtatactgttgtatgatgctttttataggccgctgcgcgcggcttttcggcaaggaggttttcctatttgcaaaaacccgttgaaccaaaaaagatcctttgcatccacgacctgtccggcgtgggacggtgcagccttgcagtgatcctgcccgtgctgtcggtcatgggcttccagccggtggcgctgcccacggtggtgctttccacccacaccggcggtctgggcacccccgcccggatggacggcagcgcctacggcatggccgcgctggagcactatcaggcgctggaactgcaatttgattgtatctataccggctatctgggcggcgaagcacaggtagcgctggctgaaaaagcctttgccctgtggcctgccgcctacaaggtggtggaccccgtgatgggcgataacggcaaagcctattccgccgttaccccggcgctgatcgagcgcatccgcaatctgtgccgcgcggcagacctgatcctgcccaactacaccgaagcacagctgcttttgcagcagcagcccgtgaccgagcagctggacgatgccgccgcgcaggcgctggcagatgctttgcagccgctggcccccaacgcggtggtcaccggcctgccgctgggcaagtacatcggctgtgccggtaccggcacggatcgttttgttatcaaaaagctgcatatcagccgcagcttccccggcacgggggatctgtacggcgcagtgctcatcggctcgctgctgcagggcaacgccctgagcgccgctgccgataacgccgcagagtttgtttcgctggctattcagggcacgccctgcacgcaggacacccgcttcggcgtgtggttcgagccgctgctgccccgcctgtgccccctgcgggaggaaccggagggcatcttatgatgaacaagccgaccttgaatatcgttctggtagagccccgcatccctcagaacaccggcaacgtggcgcgtacctgcgcctgcaccgcctgccgtctgcatctggtaggccccatgggttttgccatcgacgacaaaaaactaaagcacgccgggctggactactggcactatctggacattacctactacgacggccttgcggacttttttgcccgcaacaacggcccttactattactttaccaccaaggcaccccagcgctacaccgatgtacaatacccggacggggcttatctggtgttcgggcgcgaggatgccggcctgccggaggcgctgcttgcggaaaatcaggagcactgcattcggatgcccatgcgggacacctgccgcagcctgaacctttccaacagcgtggcggtgggcgtgtacgaggtgctgcggcagtgggatttcccggagctgctggaccacggccacctacgagattatgaatggaaatgagggaaattatgagcaagatcgcgatcctgaccgattcctcctgcgatattccgcaggagatggctgaaaagtacggcattgatatcatgagcttccacatcctgctggatgatgtggactacgttgagcgtgtggactgcaccaacaccgaattctacgataagatgcgcgcggcaaagggtgtgccctctaccgccgccatcacgcctatccagttctgtgaaaaatactgccagtatgtggacgagggctacacggatgtcatccatgtgcccatcaacaagtccggctcctccacctacaacaacgccctgatggcacaggggatgctgcgagaggagcgcccggagcatcatttgaacatccatctgctggacccccacacctattctatggtgttcggctggtatctgtgcgagatggcacgcaagctgcagaacggcgcagagatccgccatgtcatccacgagtttgagcggcagatgaactgcatggaggtcgtgctggggccttacagcctgaggcagatgaaaaagagcggccgcatctctgccgccgcagccgtcatgggcgagctgatgggcatccgtcccatcattaccctgatcgacggcaagaccaaggtggaagccaaggtgcgcggcgatgaaaaagtcgtgccagccatggtggatctgtgtcaaaaacgcgccggggatgtggaggactttgagtatatgatcggccacaccaacatcccgcaggcagaagatctggaaaaagcctgccgcaaagcctttggcaagccgccgctggccgtatttgagctgggcggtgtggtctctgccaacaccggccccgataccatagcgctgacatataccggccaccccagagggtaacacacgattttaatagcctccgcttcgctctggctatttcagcggaatcattatttgaaatttcggaataccggagcgtctgcggacgctccggtattccatttttacatgaatacgcccagagcagcgcggcgggcaagttttaatcgtcctcttcccattgcaatctgtccgattttgtgatatacttccttctgctgtgcttttttgtgcagtatcctcaaagagcaacttaggattttaggctccccggcatcactcgagcagtgccgggcaaaacccacaggagctggcggttcctgtgcggtcaaaatcaaaccgctggagtattatcatgaatcagaattcttccgtccgtaagctggtgcactgcggtgtagtggcagccatctatgtggtgctgtgtctggcactgcagcccctttcctatggtgctgtgcaggtgcgcgtggccgaggctctgtgcctgctgcccgtgttcggtgccgagtacatcgtaggtgttgtgctgggctgcttccttgcaaacctgctgggctctaccatcgtggatgtgatctttggcacactggctaccctgctggcctgtctggttacctacaagctgcgcaatgtgcgcttcaagggtctggccattgcagccagcctgcccccggtgctgttcaacgccgtgatcatcggcattgaaattgccgtgatgttcccggaccccacgtccagcgcccccatctggctggcctgcatcaccaacggcatctcggtgggcatcggcgagctgatcagctgtaccgtgctgggcgttgtgctggtaaagctgatcgagagcaacgccgcactgcgcaaggtatttgcaacggaataacacaaggaggtttccatgcagccgaacggtatgatcttctgggactggaacggtaccctgatggacgatgtggattttacccacagctgcctgaactggatgctggagacccacggctacccccagcggtacgatctggctgcctaccgggagctgttcggctttcccatcgaggactactaccgctgcgccgggttcgactttgcgcggcatccctacccggagcttgccgcccgctttatggagcattacaacgccggtgtgcccggctgcgctgtaacggcacacgccgttgacaccctgcaaacgctggcccgcatgggctggcagcaggctgtgctttctgcctcccgccgtgattacctgatcgagcaggtatccgcccggggtctgcaaggcttttttaccgagttgctcggccttgcggacatttacggcgtaagcaaagtacagcttggcaccgactacctgcgccgcaccggcattgatcctgcggcctgcgtgatggtcggcgacaccgaccatgatgccgaggtggctgctgccatcggtgcggtctgtgtgctgtacaccggcggacaccagtcccgcgcccggctggaaaaggccagtccctatgtcatcgacgaccttgcccagctgcccgcactactggaaacgatataatattagtggctcagaaacacctgtcggtgtttctgagccacttttttgcagacagcggtctgcccattgaaaaaactgccagtatccacaaaccgggtactggcagttttgatatgatgtaattaaaatttcgacggaacgagtttggacttgttagcagaacgagggttctatacgatcaatatttgcagtaggttctccgcaggaggaatctcatgccacaaaaaagtatgcaaaaaatatcaaattcgtgttgtatcaacttttaatcgactactagtttaaatatacaatttaagaatatccgacttcaaaaccttccaatctcgtttttctgctgtttcaaagcctttctttgcaagtttttggcgtagcgcttcattgttacaaatttgttcgattgcagaaattgctgcgtcgatatctccttgtggatatagtaagcagttttccccatctactagatactcgtgatttccgttgttcggaacaacaacacagaaacctcctgtggccatcatctcaataggcggatacgaaaaactttccaaccagctggatttgagcagaatatcgcactctgcataaaccgagggcgttttctcatacggtacacgatgtaagaacttatcgtatctatattctgcctttggattcgcattgtacgacatataccacacttcaaatcggtcacggtctagtcgatttgtgattttaaaactctcgtccacatttttgtagtcaactgcacaatcgccttcaattaaaattctgacttttctttctttatcaaacttccgctgtacaaaagggtatttctccagctgaattccattttgcgcgcacgaaacattatgaccatagtgttttgtcagccaatcatagcaccatgcagaaattgtcagatactgcatattatcctgcagattgtaggttgcttcacactgcagacgttcattcatattatatttgtaaaaatccgtttcataactttggactaaataacaacgtttttttacatttttataagacagtacatagtcaactgtcgtccacatagttgcaaccagaacatcataccacattttattttcaaatgtggtatcattctcccgactaaacactgggaatttatggttagcaaattcccatatttcaaacttttttccatttgcaatgatgtccacttcccaaccctggtcctgaagaaaacacgcatgccaaagagcaaccatgattccaccactgatttcacaggaaggaagtacaaaaccaatgtgctttgaaatggttttattcataaaatcgcgtaatgcgatattattgcgtgttgttacataattttctctgcaataggaataagcacgaaatgccatttcattgcggagtttttcattctgtacgagctttgtcagcacagaataccattcatcatcgctacaaagaaaacctgttacaccatcttcaatgcactgtgcaaatgccccaacacggctagccactgtacacacttctactaaagatgcctcaacccatttgttttccgattttgcctcattaaaaatcgtattttcgattggtgccaaattaatatcaacacttcctatcacttcaggcaaatgtcgccaatctacaaacggttttctaataatcctagccttatatggtttcagtgtctctggtaaatccagttcccccatcaggagtaattttacctcgggattttcatccatcacgtgcaataacgctggcagaatcagctcaaaatccgaattgtgcgtaagagagccactgaaatagccaataataacatctgtattcttcaagctattttttttacgatttttccgaactcgttcactgattttaagcatttcctcagatgcacagtttctattaataaaaacagagagaactctcttttccatctgttctttcaaccgttccgttgtcgtaattccgtactcacaaagtttcaaagttgcccccatacgaattacgccactatcataaattgctcgttctccgcgacttaatttttgaacagtcggaatactatccgtatagttcttgtcaaataccaagtcatcgatatcataataggttcgaacatttattgccttcgccatctgaattgcttcgccgattggctctgtaaagggacagcgatagaatattatagctctgcaatctaacggtgtatatttgttgcacctctcgtacggaatccacgttacagaaaaacctgctgcggtaagctgctccacttgatgtaatactctgtagcggagacactgaggaacatttgtctcgtttactccagatactattaaaatatcatgcgcaattttcttcattattgaagatgaagcatacgctggaaaccgttttggatgccttttcataaaacgctctttatgaacaggccattgatcatccttttctggatctaacgttccaaaaagttgccatgagattttccgcaaagtataccacagtccattttcgtagaagcagcgatatcttctatacaataagttcattttgattcctcccctttttcatttaccttcaaatatatcgcagatatctgtacacaggccgacttgttttacaatcccatgttcaagccaaacacattttccgcaaattttccgaatctgctcaatattatgcgacacaaacagaacggtagttccgccactcatcagttccatcatgcggttcatgctttttttctggaaatctgcatcgcctaccgccaaaacttcgtctacgatcagaacttccggctccactaccgtagcgactgagaacgccaatcttgccagcataccagaagagtagttgcgcaaaggcatatcgagaaactctgcacccagttccgagaaatccacgatttgctggtacttttctttcagaaaatcctcagaatagcctagaatggcaccgttcaggaaaatgttttcggtgcctgtcagatccatatcaaagccacttccaagctccaacatgggaaccacattgccatgtacgaccacatttccctcggttggctgaagaatgccggaaattacctttaagagcgtgcttttaccggcgccgttgtggccgatcaaaccaaccacttcacctttttccacagaaaacgatacatttttcagcgcttcaaactctgaatatttcaaatcgcccttcagttttcgaatggcaaactccttaaaactggacacgcggtcgtttgccatacgaaaacgcatggaaacattgttcacttcaatcatttttcccataatacgcccccacctcacaaatacagaacaaaacgattctgatttttgcggaataccgatacaccaatggcaaacaccaccaccgccgtaaggatacaccacagataagagatcggattgggagaaacgccatcaataatgcaaattctcgcaaagttgatatattggtacattggattcatgtggtaaagtgccaaaaacttttctggaatgatcgtatccatataaaaaatcggcgtcagatacatccagatcatactcacaacgccccacaggaacagcgtgtcctgaaagaaagtcatgcaggtggaaaggatcaagctcattcccattacaaagacaactaagcagagaatatcaaacaccagcaacagcaacgaccacttgggccaaatacgcgttaacagcatgaccgcaagcagcggtatcaaggaggttccaagattgatcaaagaagaaaacacgcggcttacggggtaaatatattttggcatatagacctttttgatcaatgctgcattgctcgtgatagaggtcattcccatattgattgcttcattaaagaagttaaaaaacactattcctgttaaaagatacacgggatagttttttgttccgctactgaacagcgttgagaataccacatactgcaccagcatggtcagcaaagggttcaggatgctccatccaacgcccagcaggcttcttttgtactttgttttaaagtctcggctcaccaactggcgggtcaaaaagccatattggatcaccattgcgtaaaatgttgtcagggggttgcattttccctgctttgcctgattccaccatcttctaatcactacggcaaccgctgcatacacgaaaaggatcagcggccagtataccttataaaagatcaggtcgttgtaaccattaaaatatgcacacagagttccactgcccgaagtgccatccacctgatacagattttctgatgcaatgcccttttgaagcgtatactttcccgcctgaatgctgtttccgtaataaacggttattgcgttgccgggctgacagccttcggaccagatttttaccgtgctatactgtttgcgcattccatcaagcgactctgcaaacgaaaagcgtatcacctgattgtcccccatatcctcaagtcttccttgtgctgaggagatcaaggtgccgtcttcgccatagatatcaacgtgaaggataccagtattttgtctgccaaaagtggcaacttgaagatttaatgcttcaacatggtcagctcccagcggcaatcgctgttcaacgaccatcccgtcaacgatttcaccaatcacagagctgggagataaggcggaaccgtttacaatttcatgtcgaaagccatctccggccacaaagaatatcattgctgcaagcagaaaataaaacactgacaactgtgtcagcaactttttcgccttttcgaaattcattttgtttgtccttttctatttttcagaagaatggcgccgtgccttttcaaccctgcgatatacatcgtatacatcacgggctcccaaaaagtatgtatcctttttagaagaggatatgtgcgggttcagtttcttttcaaaccagtaaattacagtttcccatagaagttttcgcaatgccgatggtgtaatattcgtctcttctggtttgcattttcctgaacgaatggcagccacagcctgaaacttttgacgtttctgaaagagattcaagtcaatatttccagaataaaaaccgttgataagccattgctgcgattcttgcaagcaggccgcctgacggctttcctttacttcaccgcaactatatccgctgctaagtgcaatatagcagaggagatgttccaaaacgccggggtccagcggagatgtctgatcgttcaacttttcaagcgcagctaatactacctctttccgacaccatagcgagggctgacaaaaagcctcgtaatcacacaggcgttgcggaagaggaattccataatcttttgcagcttgctttaaattgaaatgagcaaccattgcactgcggctttgcggaaagatcggcggatttagaattcctaatagaggttctgactcaaacgtatgaatcacattccgaataaagtgtggtcctgcgaccaaattaccgtacatactaaaacgaatcgaagattctgaaatatgcagaccgtttgatggatttccccacatctcctgaagaatacagaaatacttatatttatcggtttctatctggttcagcaccaaaaatagggaagcaagtccctgcggtcgattagatgaaaccgtgatgttacaagatggaaaaaactttttgattgtaggaatgagttcagtgcgacgcgttataacgttcaaatcgcaagattcagaaaggctgcataggctctccgataactcgtgaatcgaatcttcatgatcaagttctgccaggatcaatgcaggcggagtcgggtcattggcagaatattctgaaggcaaagtgaagttcaggcataggtttcccttccacagttcttggtcgtatagccgcataaggttccgatagatcagtgcagtatcatatgtggtatggctgcggatgtagctcatggaccgcatgacttgctctccattggtgaagactgtggcttctgcatttgtgcgaataaaatttttgcgtttaacaaagggacagtgatactggcttaccagccgatacattgcataagctgttggattacaaccgcaatccggattcgtatccagctttctggtatcacaaaaagcagcgtaaatataaccccacgatgcaaacgttttggttaaagacaattcataatttgacaccgtgagattgaaattatcggatatcttcatatccttccaaaatagataaaaccgctcatcctggagcagcggttgccgtattacaataaaatacgactgtaaatgttcagcaattcctggctgtttactgcctggccatttagcattagaccttgcatggatggtaattccccaaaagtcgcaaggctcacgctgcttcatctcctcaaagaccttgtctatcggcactagagggccatagcaggtatcattgaaccagaccagctcatcaaatgtgttccaatactctcttgaccgaagatttgtgaaaaagtcttttagtgctccggcatccatcccggtgttttctctacaaaaaatggtttcactccattgggaaagccgatcatgtccttcttctgtcaggaagccattgcaaacggtcacaatctccgtacaaacctttcgcatcgatgccaaaagaaacactacataatcatctacaactccttgaggatcataaaatacaaaaactccaagtcgtctcaattttttctcctttggcagttctaatttctgcgacgttgaaaactcccaaacaccaccagccacaaatcactcaggcagtttcttggtgaattgtagtacccccaccacggtgccagtgccagccagcggagcggactgcgtgtttccatgagcttctgccgctttgcacaccagatctgcgccgcagcaagcattttgcagcgttctaccggcacagcatccgggtgctctgccgcaaaagattgcagggcacaaagctgtttgtggatatagcgcaggttttctttttgcagggcaacatctttgtagcgcaccccggatgcattatcagaataccgcacataatccatcagcacacggttgtaaaaccatgcgccgtcctgcactgcggccataagccatagaaattcgtcgtggggcgagccatcaaaccacagctctttgaccgcatcaaaaaagtcgcgccgcaccgcataagtacagcccggataagggttcataaagaaatgtttggtaaatccatatcttgtaatcaggccctgcgtttctgcaggtgttttcttgtaaaccgttgcttttagggctccagactcgtagatcacacggtaatcgcaggcaaggagtttgatttccgggtgctgttccatcactgcggtcatttctgcaagcttcctcgggtaccagatatcatcctggtcgcaagggaaaagaatgtcccctgcggcttttcgcaggccctccataaagtttcgcttccagcctttgcgcttggcattgacataaaactgccagctctccagacaattcttgcggatgaagctctgtaccagctcaattgtgccatccgtggagccatcatcaaagatcagcacctcatctggtgcacgcttctgctgcaacaacgacagaagctgcttttccagatgcatttttccgttataggtggtcacgaccactgatattcgcaaaatgatgttcctccattccatacagcgcacagacctgcctgtccagattttcttctgcaaatccagcactctctacgcaatgtcccgcaaggctgcgttccatcggctttgtctggacaatacgctctgcccatgcttcatcaggctgtgtaagtgcgaggaactgggtctgcggcaggatcttcacttcctgcgtgatcgtgtcagcaaaaatgcagggcagaccgctggcctgcgcttctacacccacaatgggcaatccctcaaacaggctggtcatcacaaatacatccatcgcctgcagataatcttccggcctattcacattaccgcaaaacagcaccatctccgcaatgccaagcgccttggcttcctgctgagattgttcgaaattctctccttggccgcaaagcagaagccttgcctgtggcttttgctgcaagactgttttgaagatgcggaaaagccgggtatgatttttttgctggctgaaacggccaatgtggccaaccacaaagcagtcctgcagccccaatttcgcccgcatttgttctcgtacggacggggaaaaggaaaaacgctcgcagtctattccattgacaagcacccggaatggcctggtatatagcatctctcccgccgcacgcgaacacgccaccggatccgtaaccaaacggttcagcagtctgccaagggtcgcttgcttaagggcaggctggtgcgcgcagttatgacaatgcgtaatgcgcactgtcgcgccgccagcccatacagccagcaagtcaaatgccatcgtggcactgttgccgtggatgtgcacaacttcatagccttttttcttgaccaatgctgccagtgcggccatataacagggcagcttttttttacgggaaggcagctgatatacgctgccgatcgcttccagctgcggctggatatccgcactgcagccttcacccagtgcaaagcccaccaaatattcccgtgccgctatgcgggctacccggagcaggatctctgtcaaaccgtccatggtaagccgtgttgttgcgatcagcaaaaccttcttcatggccgattgcccttcttttgctccatagtatcccacataattcctatcttttccaactttttcgctcgttctgaagttgtgatgcaattactgtttttgcctgacttcttccgggcactttttgtcaagccaatcatcgactccttttataaccatctgccatacagctgacacaaggagtattcagatctccgtaagggtagcttccattgcaatcattttcgacataattgtacgaattctcctgttattttatcatggatgcagagggaaatcaatataaacagagcgggttttctcagataaaaacattgcatgaagcgtttcttttcaacaacacgcttattttaaggagaagcgtcccagccgatcccccatgctcgaataagttgtcaatccggcgtcaacttctgcttgccagcagccacacaaaaaaagacagtcccaccacccggtggaactgtcctcgacattttcctcgttcagctttacaaaaaagtctgtcagagtcagcctccaacagatttcctgtttgcgcctgaaataatttttggcgcttttttcaaaaccggctcgtcattctgccgaataaagaaaaaagcacgaaaattctcaacgaatcaacgtgcattttttggtcggagcagcgggatttgaacccacggcctcctcgtcccgaacgaggcgcgctaccaactgcgctatgccccgaaaataccgcagcttattcggctgcggtaactggttggggatgagagaatcgaactcccacaagtagagtcagagtctaccgcactaccactatgcaaatccccaatattcggttgtgtcagccgcgccgtgcgttgctgacaagggatattatacacgccggcgggctgcttgtcaaccattttttcagtttttctgcaaaagttttcgcagcggccgcccggtgtacataggcttgtaaatttttggtttttctcttgacagcactcccctttcggaatactctaatactataaaaaggtaggactccgggcgctccggcatcctttgccgggcggttcggctttgcctgaatgataaggaaagagggcttttgaatgaaaaaacgtgttggtatcctgacctccggcggcgattgtccgggcctgaacgccaccatccgcggcgttgcaaaagcactgtacgcccgcatgggggataatgtggagatcgtaggcatcgccaacggctacagcggcctgatcaacggcgattaccgcgagatgaccgaggacgacttccgcggcatcctgaccttaggcggcaccattctgggcaccaagcgcaccccctttaagatgatgcgtgtggtggaggacgacaacattgataaggtcgccgccatgaaaaagacctacaaggccgccaagctggactgcctgctgtgtctgggcggcaacggcacccataagaccgccaacctgctttcacaggaggggctgaacatcatcggcctgcccaagaccattgacaacgatatctacggcaccgatgtgacattcggtttccataccgctgtagacatcgccactgacgtcatcgaccgcatccacaccaccgccggcagccacagccgcgtgatgtgcatcgagatcatgggcaacaaggccggctggcttaccttgtattccggcattgccggcggcgcggacatcatcctgctgcctgagctgccctacgatatcgaccgcgtgtgcgaggccgtggagcgccgtgcgaagaagggctcgaacttctccatcctcgccgtggccgagggtgccatcaacaccgaggaagcccgcatgaagcgcaaggactggatggccaagcgtgctgagacagggcttggcaccaccgccaccaaccgcattgcgcaggcggtacagaaaaagaccggcatggagacccgcgtgtgcatcccgggtcatatgcagcgcggcggcagccccagcgcctacgaccgtgtgcttgccacccagttcggcagctatgccgcacagctggtggaggtggagcgctacggcgtgaccgtggccatggtgaaccgccgggtgaccgagaaccgtctggcagacattgccggcaagacccgcaatgtgcctgaaaactgcgagctgctgagcgtggcgcgccgcatgggcgtctgtctgggctgagcaccaatttgcgttgggatactatggataaatagcacaaaaatcggacagaccgcggtctgtccgatttttgcatttcaccatttctcagcggtcagtcacatcatgccgggtgggcaagccctcggcaaaggcggcagcgctttccagcacactgagcaccatgctctttacagcctcgtaggtgtagaaggccgtgtggtcggtcaggagcacgttgggcatcgcgcgcagcgcagccagctccgtgttcgggatcacatcccccatgcggtcgtaatagtacagaccgttctcgttttccagcacatccagactggcagcacccacctgcccgctttccagtgcctttagcagggcatcgctgtcgatcagcttgccgcgggcggtattcacgatggtcacgccgggcttcatcttggcaaaggcttcggcgttgagcaggtgatggttttcctcggtggcattggtgtgcagggtgatgacatcactctcggcaaacagggtgtccagcggcacatactccgcgatcttctttacctcttcactctggtacaagtcgtaggcaagcagacggcagccaaagccggacaggtgcttcagcacggtctgcccgatgcgtcccgtgccaatgacgcccacagtgcagtgggagatatcccgtccgagcttgcccttcagggagtagtcctgcacttcgccccgcttgaggatgtgccccgccttgcgcagactcatcagcatgagcataatggcaaagttcgccacaccctcgggaggataatccgcattggatatcttcatgcccagctcccgtgccttttccagatctatatggtcgtagccgatggagcggcagcagatggctttcaccccaagatcgtggaagcgctgcagcatgggtgcgctcatatcgcagggagtcaccgataccgcatcgcagcctgcggccagctgggcgttctccatggtgggatacacctcagtataaccgtactcgatgccatactgctttgccagttcctctacgatgccctgctcatcgtaggggcgcagggtgtagaaaaacactttgactgccataaaatctcctcctgatctttctgctgtgcggtgcgcccgcttctttataagggtgtctttattgtagcacgtttatgactgacggacaactttttacgttgaattttgttattgcgcccgtgctttctgtcccaagtgggcaaaaaaggttgtcaaaacaggaaaaacggggtatgatagaagctggatcacgggctgtgatccttcaatattgctaaaggagtgtgctttattatgcgcgcctatgaacgactgcttgattacgtcagggtctacaccacctcggacccggagtccggcacccatccttccgctgcgcgggagtttgatctggctcacaagctggtggaggaactgaaggctctgggcgtggaggatgcccgggtggacgaacactgctacgtctacggctccctgcccgccacccccggctgcgaggaaaagcccgcgctgggtctgatcgcccacatggacaccgccccggatgccggcggcgagaacgtgaaccccatcctgcacgagaactatgacggcggtgatgtggtgctgcccgccaccggcaaggtgatgaaggtctctgccttccccttccttgcctccatgaagggcgagaccctgatcaccaccgacggcaccaccctgctgggtgcagatgataaagccggtgtggctgagatcatgaccgccgtggagaccgttatccgcgagggccgtccccacggcaagctgtgcatcggctttaccccggacgaggagatcggcgagggtgccgatctgttcgatatccccggttttggtgcagactttgcctacacggtggacggcggcgatgccggcgacatcgagtacgagaacttcaacgccgctgctgccaccgtgaccatccacggcttctcggtgcaccccggctctgccaaggacaccatgatcaacgcttccaacgttgccatggagttccacggcgctctgcccgtgatggcgcgtcccgagaccaccgaggggcgtcagggcttctaccacctgtgccagatgtacggcgacgtcaccaccgcaaagctgggctacatcctgcgcgaccatgatgccgccaaactgcagttcaagaaggacaatatgcaggacattgccgattacctgaacggcaagtacggcgcaggcaccgtagaagtggagatcaaagacagctaccgcaatatgctggaaaagatcaagccccacttccacctcatcgagaccgcccgcaaggctgtgcgcatggccggtctggagccggtggaggtgcccgtgcgcggcggcaccgatggcgctaccctgagctggaatggtctgccctgccccaatctgggcaccggcggcttcaacttccacggcgtgtgcgagtgcaccaccgtggagcgaatggaccgctgcactgagatcgtgctgaacatcatctctctgtacgcagaataatttttctttcgttttctgtaaagcccttctgcataaaagcatgaccccgcgtgaaaacgcggggtcatgctgtatagttccccaaaaacgcataaaacacaaaaacccgcctggcagcgggtttttgtgtatagaggggtgggaaagtatataaagtggtgaatctcaatatcagcggcaggtttttgtgcagtgcgctgccttgcatgatgtattatacccgtttttcttttcttgtcaaacaatatttttggattttgctttaaaataatactttactttttcgcaaaaactttatataattaacatagaatttcagaaacgaaattttattccatttccgtgggtttgcacaacataaaaactttactttcagaaaattttatacaatccaacatattttttaaggagacttttatatggacgatctcgatcgcaagatcctcacgcttctggccaaaaatgcgcggatgcccgtcaaagaaatcgcagagcaggtgtcccttaccagcccggcagtttccagccgtatccacaagctggagacagacggcatcatcagcggctataccgtcacgctgaaccgtccggcagaccggatgtatgtggatgcgctcatcagcctttcggtggctccctccaagcaggatgcctttctggagctgctgcagaacagccgcgaggtgctgcagtgctaccacgttaccggcgcgtatacctttctggtcaaggtcagctgcggcagcatggcacagctggaacatctgattctgcagttccagaagctgggcactaccagcacccagatcatcctgtccaccccggtgaaccacggcgatctggacgctttgatgctgtaagcgggcactgttcataaaactgttactttttccctgcaattctgctgtgcagtgattcgtatccagaatagcagcccaaaaccggcacacactacctgtagcgtgtgcgccccggctgcaccttccacacacagcactatgaaaggaactttaatactatgaaaagattcatcgccgccctgctggcagggctgaccctgtttaccttggtgggctgctccggcggcagcaaggccgacagctccacccccaaagactactcccagatcatccacgatgcccgcagcgacgaggacaacgagtacgatatgatctttaccaagggcgaggacggcaagtttaccgccattgacggttacagcgccgagtacaaggccgaccagctggacgaagagatccgggatatcctgatgccgctgctgaatctggaggacgaccagtacaccgcctttgccgccagcatttccagcatgatggtgcgcagctatgctgttgccatcgtaaagcccgccgagggcaagaccgatgcagtaaaggctgcactggaagcctatgttgccagcgaacagcagtccatggagcattatctggaggatcagtaccttgttgcaaaggctgccaccgtcaccgtagcgcccaccggcgaggtggttctggtctgcgctgaggatcacgacaccattctgtccaacattgaaaaggctctggccgcgtaaaatgcgtttctgagagaagccgctgcacagcgttttgtgcagcggcttcttttttttcagaacttcagccgctcctgcaaaaaacggcacagcggtgcaagggcatccggggcaaagccgggcaccagcagggtctgcccgtccagctctgctggtgcaatatgcgtccgctgcacaaaagggctgctgcacatcgcggtgcagcagcccttcagtttacctttccatgcacagcacatccatgttgccaaagccctgcatggcgttgatatccttgatgatggcgctgcctgcggaggctgccgcaatttcaccggaatttttgctgaaaatcattgattttatctgtcaaagcattcataatatctttaattgtaaaagacgttttcgtgtgcaggaggaaaagcatgaaacaggagctgatggacgccattcaggaaatgccggtcattgctgccgtcaaggacgatgccgggctttgcagcgcgctgaccaacgagaatatccgggtggtctttgtattatatggagatatctgcaatatctcctccatcgtgcgccgcatccacgaaacagggcgctttgccgtggtgcacatagatcttattgccgggctggcgggcaaggaggtagcggtggacttcatccgcaataccaccgaagcggacggcatcatctccacccggcagtccttcatccgccgcgccaaggagctggggctggctgccatcctgcgggtattcctgctggattccatcgcgctggaaagtctggacaagatccccgcaaacctgccggactgtctggatctgctgcccggcgctatgcccaagatcctgcgccgcgtctgcgccaaggccaaggtgccggtgctgaccggcgggctgatcgcggacaaggaggatgtgatggcggctctggaagccggtgccaccgctatttccaccaccaatcaggcggtgtgggatatgtgatccgcattctgcgcaaaagcggcgggtgttttttgtaagggtttcacaaaaagtgcaaaacaccttgctttttgtgcagggacagggtatcataaaagcaaacaagtgctgtttgtttcaagagatatgagcgaaacggacaagggcagttgcctttgtttcggttcgctctttttttgtgcaaccaacagatgcccggctcccgcaggccaaggcagaacggacaggaggaaaagaacaatgtatgatatcgcgatcatcggctgtggcgtcattggtgctgctgccgcctatgcgctgtcgcgctacgacaacagggtggtcatccttgaggccgaaaacgatgtggcagactgcaccaccaaggccaacagcgccattctccacgcaggctacgaccccgcccccggcacccgcatggcacggctgaatgtgcgtggcgtggcactggcaaaggagatctgcacaaagctggatgtctcctataagcagtgcggctcgctggtgctggcactggacgaaaaggaactgccccacctgcagcatctgttcgaaaacggcaccgccaacggcgtgcccggcatgaagatcctttcccgggaagagactcttgccatggagcccaacctttctgaaaaggtctgcggcgcactgtgggcccccagcgccgccatcgtgaacccgtgggagtacgcactggccatgaccgaggtggcagtgcgcaacggcgtggagctgcgccgcagctgcaaggtgaccgatgccgaagccatcgagggcggttaccgcctgaccgtgcccggcggcacggtagagacccgctgcgtcatcaacgctgccggtatctgggcagacaaggtgcactccatggtagagcccgccaacttccgcatcatccccacccggggcgagtactacctgctggacaagagcgagggcacccgcgtgagccacgttatcttccagtgccccaacgcgctgggcaagggcgtgctggtagcacctaccgtgcacggcaacctgctcgttggccccaacgcagagccggtggaaggcaacgacacctcctgcaccagcagcggtctggaattcgtcaagaccactgcccagcgcagcgtgcccagcatcaactttggcgagtccatccgcagctttgcgggcgtgcgcgccaatctggacgtggacgactttatcattggcgaagagccggaagcacccggctggatcgaccttgccggcatgaagagccccggcctgtccgctgccccggcggttgctgaggaagctgttgccatcctgcaccagcgcggtattctgggcgctgaaaaggccgattacaaggacggccgccgccatatccgcttcaaggagctttccgcagaggaaaaggcggcactggtcagggaacagcccgcctatggccgggtgatctgccgctgcgagaccatcaccgagggcgagatcttagcagccctccacagcgaggtgcccgccaccaccatcgacggcgtaaagcgccgcgccggtgcaggcatgggccgctgtcagggcggtttctgcggcccccgcgtgctggaactgatcagccgtgagctgggcatagaccccttggacatcctgcaggacaagaacggctcgaacgttctggtcagcgaaacgaaggtaggaggaaagagcaatggttgatctggtcattatcggcggcggccctgcgggccttgctgctgcctgcaaggcatgggaaagcggtctgcgcgacatcctcattctggagcgcgacaaggagctgggcggcattctgaaccagtgcatccacaacggcttcggtctgcaccgctttggcgagcagctgaccggcccggagtacgccggacgctttattgcgatgctcaagaacaccggcgtgaaggtgcagctggacaccatggtgctggaagtgaccccggataaaaaggtgcactgtgtttccaaggagtacggctatcagatcatcgaagccaagagcatcgttctgggcatgggctgccgtgagcgcacccgcggtgccatcggcaccccgggcacccgtcctgccggtgtgtacaccgccggtgccgcacagcgctatgtgaacatggaaggttatctggtgggcaagcgggtgctgatcctcggcagcggcgacatcggcctgatcatggcacgccgcatgacccttgagggcgcaaaggtgctggcctgcgtagaggtgatgccctactccggcggcctgacccgcaacatcgtgcagtgcctgaacgactttgatattcctctgtacctctcccacaccatcgtggatattcagggcaagaatcgcgtagaaaaggccattgtggccgaaatcggccccgaccgcaagcccatccccggcaccgagatggagtttgatgtagacaccatcctgctgagcgtaggtttgatccctgagaacgagctgaccaagcaggccggtatcgagatggatccccgcaccaagggtgccatcgtgtacgagaacatggagaccagcattcccggcgtgtttgcctgcggcaacgtggtgcaggtacacgatctggtggactttgtttccggcgagagcgagctggccggtgcggccgctgccagctacgtccagaacggccccgtagccgagggacgcgtgctgaccgtgaagcccggtgcagatcttggctacaccctgccgcagcgcatccgtctggagggcgtggaaaagagcaccaacgtctccttccgcgtccgccgcatctgcggcaggagcaccatccttgtcaagagcggtgacacggtgatcgcacgcttcaagcgcgaccgccttgcccccggtgagatggagcacattgccctgcccagagtgctgctggacagagcccccgtggacgaagtgaccattgagatcgaggaggcatgagcgatatgaaggaagtaatttgcacctgctgcccgcagggctgccatctgcaggtggatgaggccaacggctataaagtgaccggcaacggctgccccaacggcatcgcctacggcaaggaagagctgacccaccccacccgcatcattaccagcaccgtgcgcgccgagggctgcctgcactcccgctgcccggtcaagacctccaagcccgtgcccaagggacagatggccgaggttgtcgccgcgctggacagcgtggtgctgcacgcgcccatccatgtgggtgatgtggtgctgcacaacgtctgcgacaccggggcagacattgtgacctgccgcgatatggcataaaagcctttctgcacaaagtcaaagcagccgctgcaccttgccgtgcggcggctgctttgcgttggcggtgcaaaacacaggtgcagcaagcccccttccgggtcgtcccgtctcccatcgcagcgcaagctgctcttgactttttgccgccgaaccggtatgttggtactgtccgtttgccacacagcattgcatttataatataaggtaactttatgaaaatacacagcacgacccctttgcagatcactgaccgctttggcgcacaggcggcctttgccagcctgcgcctgccggacggcaccgaagccgccgtaccggcagagcacgccgccgctatctatgtaaacgagcagcccgccttccgggtggtatgcaccccggcgctgctgccgcagctggccttggggcggctgctcaccgaagggtggatcgcatctgcagacgaggtggagcagatcgccgtctgcgccgagggtgcaaaggtgcaggtatatctgcgccacccgctgcccacccgccgcgccgccgcgcaggaggttgccagctgctgcaccgataatatcgcgctgggcagtccggtggagcagcagcccctgcgccctgtgccggggctggccttgcagccggaatgggtgcagaccctgaccgccgccatgcacgccggtctgccgctgtaccgcgccacccgggcggtgcacagctgctttgtgctgcacaaagggaaaattgtttttgcctgcgaggatctggggcggcacaacgcgctggataaggcggtgggctgcgcggtgctggcagggctgccgctggcagaatgcgtgctgtacaccagcggccgggtgccgctggatatggtgcgcaaggccatccgcgccggggtgccggtgctggtaagcaaaagtatgcccaccgtgcaatccgcagagcttgcggcggaatacggcctgcagctggtgtgcggacgcaaaatccctaaagtttaagcaaagattacaaaaacaatagttacaaatcggaaaaggctgtccatttctgttgacatcctttgcgcccccatgttaatatattatcgaagagaccgctccgctgttgcagcagccagagcggcctcaattgttgtccggggttacccggcaaaaataaaaaacaggcaggtgataacatgaagcaggcaaccaacccgtttgcgcccgtaccgctgtggcgcaagcggctgccgggctatgcagccatgggcgttgcgaccatcgccttggcggtcggtctgaccaccttgcaaagcgcacgcaccacggttgccggtaccctgctgccggtgtcggaggcggatgcagccacctacggcatcagcgcagtgtaccagctcgacgatggcagctaccgcgtggagggctctcagaagggcttccagagcgatgtacaggctgccgtgaccattgacgccgaaggcaatgtttccgcagtagagatcctctctcaggacgaaacggaaagccttggcggtcagtgcgtcaatccggagttcacgtcccagtatcagggcgcagcccccttcacgctggcgggcaaaagctacaccgtaacggaccccgttaccggtgccgcctatgccgctgccggtgcagcggaggagcagcccgctgctgccggggattttgaccccgcacagtggcgcaccttcgatacctctcccgaggccgaggcgacccgcaagatgtatgctgcggggcttaccctctcggcactaaatggagagcccttggacgatgaactggctccgccgctggattccagcgcagaggccgtggcacggcgcaagctgtacgcagccatgctcagcaagagcgcactggacggcgagccgatggcgatcccctttgcggatctctcggcagaagagcagtccaaggtgcgtctggagcaggccagcctgaccaccaccggcaatgcgtccggtgccgtcagcgcagacctgaccgaggtggacgccctttccggcgcgaccatcacctcttcggctgtgacgaccatcgtcaacaactcgtatttctatgtgaccggggtgctctgcgcagagtgacctcaacggaggaatggaacctatggcaaaaactgatttcctgacggctgacatgacccgccgtcaattcatgaagatctcgggcaagagccttgcagggctcaccctgtccgcttccatgctgtccctgttcggctgctctcagcagcaggtggattccggcgcagtggccacttgggcactgccgcagggcctgctggtggtcaacgcagacctgtgcaccggctgccagcgctgcgagatcaactgcaccctgaccaacgacggcgtgtgctcctcttacatcagccgcgtcaagatccagcgccgcctgaatctggacggtgccggcaacggcctgctgtccggcaccgataactgctttgtctacttcccggacacctgccgccagtgcaaggaccccgcctgcggcaatgcctgcccgcagaaggctattaccaccgacagccgcggcatccgcgtagtggataccgacaagtgcatcggctgcggtgcctgccatgaggcctgcccgtggcatatgcccaccgtcaaccccgagaccggcaagtcctccaagtgcatcgcctgcggtgcctgcgtggcaggctgcccgtccggcgctctgtccatcgtggactgggatgccgttaccagcgcagcacaggctgcatacttggatctgtaaggaggaactacaatggctgaaagttatggctgggcaggcaagatcctgcgcgtcaacctgaccaccggcgagatcaccacgcaggatgacgaaaagtaccataagtatatcggcggtatgggcatggcctaccgcattatgtatgaagaagcgcccatggagctggacccctatgacgagaaggctctggtcatcttcggtgtcggccccctgaccggcgcaggcgtgccctgctccggccgtatgaacgtgaccttccgctccacctggtccaaaggtcactccatcatcgacgctcacatgggcggccacatcggctccatgctgaagtatgccggttacgacggcatcgttgtcagcggcatctccgaaaagcccgtttacctgcgcatcgaggacggcgaggtctctctggaggacgcaaccgagatctggggcaagggcacctttgctgccaacaagtggatggtagagcagaacggccgcgagttcgagaccgcttccatcggccccgccggtgagaatctggtggactactccaccctgaacaccagcttcggcaactccggcggtgccggtctgggcgctgccatgggcaacaagaagctgaagggtctggccatccgcggcaccggcagcgtcaaggtggctgaccccaagaaggtgctggagctctccaactacatgatgggcaacctgatcggcggcaacaacaaccacaacgtgcccgcacagccccagagctgggcagagtacagcgctacctccggcaagaaccgctggtccggcgctcccggccgtatgtggaagaaggctcccggcggccccgtggataccggcgagcagccctacaacgatatcaacaaggtggctctgcgctgcttcaagggctacttcgacttcggcgctcccgctgccgagtataccgtgaagaacggcggctgctcatcctgccccatccgctgctacaccgagtatgatgtggatccgctggcagattacgatctgcccacccacaactccaacacctgtatgcccgtgctgtacggcacccgcgtctacccggacggcgtgcacgacttcaagtacgagggcgacggcaccatggtcatcaatctggcatgggctcatgctgtggacgatatgggtctgtgggacaactacggcaacctgaaccgcgacctgctgtggatcctgcggatgccccgcgaggaggccaccaagtacatcagcgaggccgagtacgactctctgccttgggagtgggagaaggccggcgatccccgctgggaggtcgagctgatccgccgcatggcttacggcgagggcgacctgtccgtcatcgccaagggcacgctggccatgatggaaaagttcggcctgcccaagagctggctggaccgcgacgatggcgctaccaactccaacctgatctacaacggcttccccaaccaccacggccctgctgaggcatggcaggttggtatgctgtacaacctcgtctacaaccgtgactgcatgatccacgagatcgtctgcgagaccggttccggcgctccctatgaggtgaccaagaaggtcatggaggacttcttcggcgaaggctgctacgataaggccaaggcctacactcccatcaacgagaacaaggcaaagctggctgcctactgcgtcaacgataagaacttccacgactccgccaccctgtgcaactggatgtggcccatgacccagtctccctccaaggagcgcgactaccacggcgatctggacctgcaggcagactttatgactgctgttaccggcgagacctatacccaggccggtctgcaggaggacggcgcgcgcattacccagatgctgcgcgcgatgactgccatcagcttccagcagaactgcggcagcgcaaacctgcgtcaggagcacgacgccatctgcgattgggtgtttgataaggaccccgacttcaaggcatttgaggaaggcaccaccaagctggaccgcgccgacatggagaaggctaaggatctgttctacgacatcttcggctgggaccgcaccaccggtgtgcccacccgcgagacgctggagaagtatgatctggctgacatggccgatgatctggaaaagcgcggcatctacgcccagaacaccgcagcagctgaataaatccaacagataaatcccatagaaagaggaaagaccgtcatgttgtttggcagacgtaaacccggctacaccaccacggtggatggcagcgtagacccggagcaggccgttctggaactgcaaaaggcagagctggccgccaagaaaaagcccaaggcagaggtgttcgacatcgacgccgcaagcgagactgcccgccgcctgaaggagaccggcagcacctttgacggcagcgccgccaagaccggcgaggatgtgatcgccgcagtggagcgggagaccgccgaacttgccgcaaagcaggccgccgaaaccgcacccgaagccgccgaagctgcgcagcccgatgctgcaaagccggagctgctggattttctggcaagtgagccggaggcggaaaacgatccctttgcggatcagcccaccaagaccgccccggagctgccggagctgacccctgcacaggagctggccggttacatccgtgcccgctctgcggctgcgctgattaccccccacgctttgctgctggaggaagtggaaaacgccgatgagctgctggcgcagatgcccgcagacccccagtgcaccgatatcgtcacccgcgcgggtgcaaaggacacctactactattccaacgccaacatgagcgataactacgccatgatcgcgcagctcatcgaggacaaggatctgtgtgtgatgtttgctgagatggtgcggttcaacgcccgcatctaccccagcgccaccccgctcaagtacttccagcgctccccctacggccttgcgccggaggtcatcgagcagacatggaaggccatgcaggagaacccggagtatgccgatatcgaggagctgaccaacaaccagaacgagcggttcctcttttccaccaagcacctcacccgccgctacgccaaggctatcagcgacgtggacgatttctgcgactaaattctacaattgaatcagggtataagagcttctttgagcaaaggtgtctaaaccacacaggcactgacaccgcgccgcaatgctaagggctgcataagccggcattcaagggtggcgggggaaaccccaccgccttcccgcagaagaaacgctgcaatttgaaaaaaagaactcctcccatcttcacaggtgctttttggctgtgtgctgccgctgcaagggcggcgcatagccaaaggctgccaccggcgtagcagactgcaaactgccgcagccggttttgtggggatattctgcggaggcgttttgattttccagtcaagacgtctccgcttctttttcacctgccttttttgaaaaaagaatacccctgctcccccgcctgagccatagcaggctgggagagcgggtctatggaggaagttataatgaatcagcctttctgctcccccgttcaggcgctgcgcagcgtgctggacgcggcagcgcttctgccttctccgtccccggagaccatcccgctggaagccgcctgcgggcgcattgccgccggtgacatttgcgcccggatggaccagcccccctttgaccgcagcccgctggacggctacgccctgcacagtgcggataccgccggtgcaagccgggagaccccggtcaccctgccggtggtgatgaagctttacgcgggcgatgccccggctgcggcgctgcccgcagggtgcgctgcccgcattatgaccggcgcacccctgccggagggtgcggactgcgtcctgatgcaggaactgaccgacagcggcgaagagaccgtgcagctttatgccgccgtaaagcccctgcaaaacgtggtgttccggggcgaggatgtggccgcaggcgcggtcatcgcgcccgccgggacggtgctctcccccgcccatctgggtgtgctggccgggcagggctacgccgaagtaaccgtctgccgcccgctgaacgtgggcatcctttccaccggcagcgagctgctggaacccggcgcaccgtgggcacccggtaaaatttacgatgccaacgggttccagaacgccgcccggctgcgtcagctgggctttgccgtggagcgacagcagtgctccgatagcccggaggtcatcaccggcaaaatgcaggagctgctgacccgctgcgatgccgtcatcacgagcggcggtgtctctgtggggcagaaggactatctgccccttgtactggaaaagctgggtgcacagctgctggtggagggcgtagcccagaaacccggcagccccatgctggcggctacacttaacggcaagctggtgttctgcctgtccggcaacccctttgccgccgctgccacgctggagcagtacgccatccctgcgctgctgcgcgctgccggacgccgggaggagagctgccttcccgcccgcaccgtctgcaccctgaccaatggcttttccaaacccagcaagggcaaccgctatctgcgggcgactgcctgcggcggcaaggtaacgctgcccggcgcgggcagcaccgaggtgcactcctccggtgcgctgtccgccatgatgggctgcaactgtctggtggagatccccgccggaagcggaccggtagaacccggtatggaagtggaggtgctttgctttgtacagtgaacaaaaacaggcgctggccgagacacaggcgctcaaacgcccggcggtgctggcggtcagcggggtgcacaacagcggtaagaccaccctgctggaaaagctgctgcccgtgctgcgcagccgtggactgaaggtgggcgttatcaagcacgacggccacgattttaccccggacgtgcccggcaccgacagctaccgcctgcgggaagccggtgccgagggcgtggcggtctactccggcacgcgctacctgctgaccgaggaattccgcctgaccgagcaggatctgcttgccctgttcgagcgtcacggctatgaccttgtgctgctggaagggttcaagtccagcggctggccgaagatcgaggtggtgcgcagcgccatttcggatgcgcccgtctccttccagccgctggcggtggtgggggatatccccggcgcagattttgacctgaacgatattccggcactggcagactggatcgaagcccagatgcccgcgctgtaaggagaatgccatcatgaaactgatccgtactgttgacgccgcagggcaggtgctctgccatgatatcacccagatcatcccgggcgagtacaaggatgcccgcttccgcaaggggcacgtcatccagcccgaggacatccccgtgctgctttccatcggcaaggagaacctctacgtctgggaaaagcaccccggcatcctccacgaggacgaagcagccgccctgctgtacaaggccgctgcgggcaaaaatatccacggcactgcgccgaaagaaggcaagatcgagctgattgcggactgcgacgggctgctaaagatcaaccgcagggcgctaatggctgtgaacagcaccccgcagatgatgatcgccactatccacggcgacctgccggtgaaaaaggggcagaagctggccggtacccgcatcatcccgctggtcatcgagcaggagaagatggacgccatgcaggccgctgccggggcagagcctatcctgaacgtgctgcccatgcaggctaagaaggtgggcatcatcaccaccggcagcgaggtgttcaagggacgcatcgaggataaattcactcccatcctgcaaagcaagctggcggtctacggctgcgagatggttttccataaggtctgcgatgacgaccccgccgggatcaccgccgccattctggaagccaaggccgcagggtgtgagctgatctttaccaccggcggcatgagcgtggaccccgacgaccgcaccccgctggccatcaagaacaccggggcggatatcatcacctacggtgcaccggtgctgccgggagccatgttccttgtcagctatctggacggtgtgccggtgtgcggcctgcccggctgcgtgatgtacgccaagcgcaccatttttgacctgctgctgcctcgcctgctggcagatgaccccatcaccgccgaggatatcgcccgcttgggcgaaggcggcctgtgcctgaactgcgaagtgtgccactggccgaactgcggctttgggcactgctaagggcagcttgctcgccctctccgtcacggcttacgccgtgccacctctcccaaagggagaggccttggcaaagagatgaagtttgcgtggactgccaagggctcccactttgggggagctggcgaatgaaatgagcctgagagggcgaggacgtttgcaaatttgattcattttaaaataagaaagatacgatctttatgaatgataataatctgacacattttgatgccgccgggaacgccgtgatggtggacgtgagcgcaaagcccgtcaccacccgggaagccattgcccacggcattattaccatgaacgccgaagcctttgccgcagtgcagagcggcactgtgaaaaaaggcgatgtgctgggcgtggcgcgcattgcgggcattatggccaccaagcgcaccagcgagctgatccccctgtgccatccgctgcccctgaccaaggtgggcatcgagttccgtctgctgcctgagcggcaggctgtggaagccctgtgcaccgtaaaaaccagtggtgtgaccggcgtggagatggaagcgctgaccggcgtttccaccgcgctgcttaccatctacgatatgtgcaaggccgtggataagggcatggagctgggcgagatccatctggtggaaaagaccggcggcaagagcggccactacatccgggcggagggcggctatgtttgatcgttaccagcgcgatatccattacctgcgcctgtcggtgaccgacctgtgcaatctgcgctgccgctactgtatgccggacggcgtggaaaagctggagcgagaggccgtgctgacctacgaggaatttctgcgtctggccgcgctgtttgcccggtgcggcattgacaccgtgcgagtgaccggcggcgagccgctggtgcgcaagaacgtggcgcagctggttgcagggcttaaagagactccgggcatccgccgggtcaccctgaccaccaacgcagtgctgctggcagagcagctgcccgcattgctggacgccgggctggacagtgtgaacatcagtctggacaccctgcgcccggaggtgttccggcagatcaccgcccgggacgattttgccgccgtgcaggcgggcttgcaggcggcgctgcaaagcggtctgcccgtcaagctgaactgcgtgccgcaggcgggcgtcaacgagggtgagctggaacagctcgccgctctggcaaaggacaacgccatgcaggtgcggttcattgagatgatgcccatcggctacggcgctgccatgccctgcatctccggcccggaactgcgggtgcggtttgcccggcgctggccggagcttgcgcccctttcccccgcgcaggagcacgccttgggtgacggcccggcggtgtactacaccgtgccgggctggcagggaagcatcggctttattgcagcggtgcacggcaagttctgcgcttcctgtaaccgtgtgcggctgaccagtcagggctttttgcgcccctgccttgccagcgagaccgggtgcgacctgcgcgccctgctgcgcagcggcgcggacgacgcgcagctgctggccgccatccgggagaccatctgggcaaagccccgggaacaccattttaacgacagttccatgcccgctacccgcgggatgtatcgcattggaggataaataactatgggtaagcttctggcaatctgtaccagccccaagcggggcaccgtaaaaaccgaggtgccccgcgccgttttgaccccggaatggggcatcgtggaggacgcccacggcggcaactggcaccgtcaggtcagtatgctcagcgccgaaaaaatcgaggcgttccgcaagaagatctgggtggactacggtgccttcggcgaaaatctggtcatcgagggcttcgatttccgcaatctgccggtgacaagccggttcgccatcggggacgtggtactggaaatgacccagatcggcaaagagtgccacaacgactgcgtcatcaagcagcagaccggcgagtgcatcatgccccacgagggtgtgttcgcccgggtgctcaccggcggcgagatccatgtgggggacgaggtgaccctgctgcccgcactggaaaacccgcccctgcgcgctgccgttatcaccctttcggataaaggcagccgcggcgagcgggaggataaaagcggcccgctgatcgcccaaatgctcaccgccgcaggctatgtggtggaggagaccatgattttaccggacgaggccaaggcactgaaagcgcagctcatccgcatggcagacggccgtcaggtgaaccttgtgctcaccaccggcggcaccggcttctccccccgtgacatcaccccggaagccacctgcgccgttgccgaccgcaacgcccccggcattgccgaagccatgcgctaccacagcctgagcatcaccccgcgcggaatgctgagccgcggtgtcagcgtgctgcgcggcaagaccctgatcgtcaatctgccgggcagccccaaggcagtgcaggagaatctggagtacatcctgcccagcttggagcacggggtacgcatcgccgcaggtttggacggcgagtgcgcccgcaagtaaggtttcctgccctgttttcctttacggggcgtagaaatatactattttttcacttaaagtaaggagaaacagagatgaacgaccatcgcatttcccgccggagttttctggtcgctgccggtatggccggtgcagccactgccctcaccgcctgcggcggtgctgcttccagcgcagcatcgtctgtggcttcctctgccgccgcttcctcggaagcggcccagagcgtggagctgatcgtgtttgccgccgcctccctcaccgagacactcaatgctctcggcgagagctacacggcagagcacccggaggtgaccttccgctttaacttcgactcctccggtaccctcaagacccagatccaggagggcgcggattgcgatctgttcatctctgccggtcagaagcagatgaaccagctggacatcaccgcttctgccgatgtgaacaaggacggccttgactttgtggatgccgacagccgcgtggacctgctggaaaacaaggtggtgctctgcgtgccggagggcagcgacaagggcattgacagctttgacgcactggccgagcacctgaaggcgcaggatatcctgttctgcatgggcaacagcgatgtgcccgtggggcagtacacccagaagatccttgcctactaccagctggacgaagccgcactggctgctgcgggtgtgatcacctacggttccaacgtcaaggaggtgaccacgcagatcaccgaaggcagcgtggatgccggtgtcgtttactgcaccgatgcctacagcgccggtctgacccccgtggacgaggccaccagggagatgtgcggtcaggtcatctatcccgccgctgtgctgaaggccgcccccaacgccgaggctgccaaagagtttttggcttacttacagaccgacaaggccatgaccgtattcgagggcgtgggcttcagcgccgtataaaggagcagacatggactggtatccgttgtggaacagcctgcgcattgctttgatcagctgcgtggcggtgttctttcttggcatttttgccgcctattatattgctcgtctgccccgggtggtcaagggggtgctggatgtgctgctcaccctgcctatggtgctgccgcccacggtggtgggctactttctgctgctgctcttcggcgcaaagcggccgctgggcatctttttcatgcagcagtttggggtaaagctggtcatgaactggtacagcgccatctttgcttctatcgtggtggcttttccgctgatgtaccgcaccgcgcgcggcgcgtttgaaagttttgacgaaacgctggcgtggtcggcgcagacactgggacagtccgatacatggatcttctggcgggtgcggatgcccgcctgccgtcagggcattctggcgggcacagtgctggcctttgcccgggcactgggcgaatacggcgctaccagcatgatcgcgggctacacccccggcaagaccgccaccatcgccaccacggtctaccagctgtggcgcaccaacgatgagctgggcgctatgcggtgggtgctggtggatatcgccatctcggcggtggtgctgctggcggtgaacctgctggagaaaaaacagaaagcgggtgcccgcaaatgagccttgaagtcaacattgaaaaaaagctggacggcttcaccctccgcgctgcctttaccgccggcaacgcctccaccgccctgctgggtgcttccggctgcggcaaaagcatgaccctgcggtgcattgcaggcatcgtaaagccggaccgcggacgcatcgtgctggacgggcgggttctgttcgacagtgcacagcacatcgacctgccgccgcagcagcggggcgtggggctgctgttccagaactacgccctgttccccaacatgaccgtggagcagaatgtcctctgcggcctgaaggcggaaaaagaccccgccgcccgccgcgctgcctgcgccgaaatgctgcgcaccatgcggctggaagagctggcaaaacgttaccccgcccagctttccggcggacagcagcagcgcgccgcgctggcgcgcattctggtgggcaagccccgcatcctgatgctggacgagcccttcagtgcgctggacagctacctgcgggaggaggtagagggcgaggtaggcagcctgctggcaaactttgcgggcactgccctgctggtgacccacaaccgggacgaggcctaccgcctgtgcaaagagatgatcgttctgaacgaagggcaggtgctgcgcaccggcagcaccaaggccgtttttgccgacccgcagagcattgccgccgcgcggctgaccggctgcaagaacattctgccctgcaccccgctggacagccacaccgtccggctggacggctggaacaccaccctgcggctggcgctgcccgtcccggcgggctgcaccgctgtgggcatccgtgcccacgactttacgccctgcgctgcggacgcgcccaacgccatcccggtaaaagccgtttccaccagcgagaatccctttgactggaacctcatctgcacgccgccggagggcacggcgcagctgtggtggaaggtaagcaaaaaaagcctttcttcggcagcgcccgccgcaccgcagcacctgtgtgccgcgccggagagcatcatgccgctgaaaggctgaaaaatatttatctaaaattcaatgcgccagacccgcaggtctggcgcattgaattttattcttctacttttttcagaacaccgccgggacgatttgctgggcatccacatccacgatgccgtaggtgttcagccgcagcttcgggatgaccggcaggctgacgaaagcaagggtcataaaggcgtcgatgtcctccgagatgccgtgggctttcagcgctgccttgagcgcttgcagcttttcctccacggcttcggcgctctcggtgctcataagccctgccaccggcagcggcagctcgcccactacctgtccgttcagcgcaaaggcaaggccgcccttatttttgcgcaccgtgttgcccgccagcaccatgtcggcatcgttggtgcccgccacgatgaggttgtgggagtcgtgagcaatgctggaagccactgcgccgcattgcaggccgtagttgcccaaaaagcccaagcccacatgaccggagcggtgatgccgctcgaacaccgccagcttgacgatctgctgcgtcacgtccacgccgggcgctgtgcccgggtgctgacagaacggaacgatcttttcggtagtcagcagggaatgcggggtcaggcagatcacccgctgccgggtgccggtctgttccagctgcaattgctccggggtgatctcgtccatattgaaggaatcgaacacccgcgcaaaccgtgctttgtccaccgcaagggcggctgggtgcagcattttgccctgctgcgccaccagcttgccctttttgtacacctgctccaccgtgaacttttccagatcggacagcacgatcaggtcggcggtatagccgggagctaccgcgccgctgtgcgcaagaccgaaatactggcacggaacaagagtgcccatgcgcaccgccaccaccgggtctaccccggcggcaatggccttgcggatgatataatcgatgtgcccgccctgcaacaggtctccggggtgcttgtcgtcggtcaccagcatacagcggctgcaataaggctcccggaacaggggcagcaggctttccatgttctgggctgccgtgccctcccgcaccatgatgtactggccgcgccgcagcttttccatggcttcatggatgtccgagcattcatggtcagactgcaccccggcggcgacataggcgttcagctcctccccgctgaggaagggtgcgtgcccatcgatctttttgcccgcagcggtgcagtcgcagatcttctgcaggatcttttcgtccgcgcgcaccgtgccgtaggagttcatcagctccgccagacccagcacccggggctgccggtaataggggcgcaaatgctctgcttccagcaccgcaccggactcgtccagcccggtcgccggcacgcaggagggcagcatgaagtagaccgaaagtgccagatcttttgtggtctccagcataaagtccagccctgctgtaccggctacattggagatctcgtgcgggtcggtgaccaccgccgtagtgccgtggggcagcaccgcctgttcaaaggccgggccgcagagcatggagctttcaatgtggatgtgcccatccacaagccccgggcagacatacttgccctgcaagtccagctcggtctcaccggtgtagtgccccacgccaaggatgatgccctgacagatggctacatcggcctgctcgatctcgtttgtgaacacgttgatgacccaggcatttttcagcacaagctctgcccgcacgtcaccctttgccgtcaggatctgctgcttcaaggtttccattttcataagggcccccttgtcctgcttttactgttaaaaacttgcgttctgctgccggaaatactgtttttggtttacatggcgatccagcccagagcgtttgccaccgagcttgccagaatgatggctgcaaaaatggggcacagccagcggatcataaaattgaacaccggcttgcggcggaaccgctgaccgtcctgctccacctcctgcgcgatctgctccacgccgatgacgcgggacaccagcaggcaggtggcaatggctgcaatgggcatcatgaccgagttggtcaaaaagtcgaagaagtccaaaaactgcatcccgaacacggtcaccccggccagcgggccgtagcccagtgccgacaggctgcccagcgccaccatgatggcgccgatgagcacggtggagcgggtgcgatcccaacccagctcgtcctcaaaggtggagacggcgctctcggtcagggcgatggagctggtaatggctgcaaacagcaccagcacaaagaacagcacgcccaccacggtgcccagacccatgctggcaaacaccttggggatggtgatgaacatcagtgcagggccggcctgcagggtgtccgggtcgccgccggagaaggcgaacaccgccgggatgatcatcagacctgccatgatggcaatggcggtatcgaacacctccacgttctcggtggactcctcgatggagacatccttcttcatataagagccaaaggtgaccagaatgcccatggcgatggacaaagaatagaacatctgccccatggcggtgactacagtcatccacgaaaagtttttggggttgggcaccagaaagtacttcacacccgccagtgcgccgggacgggtgacagagtaccccgcaatgatcagcgacagcaccaccagcaccggcatcatcaccttggagacgcgctccacgccgttgcgcacaccggcaaagataatgcccagcgtgaacagactgaacagcaaaaaggccagttcggcctgcaagccgttggtgataaaggcggagaagtagccgtccgctgccagattgctgccgcgtccgcacagatactcggccagatagtggatgacccagccgccgatgaccgaataatacggcacgatcaaaatggggataatggcgttgatccagccgccgaaccggatgcccctgcccttgccgaagtgggcgtaggcgctgaccgggcttttgtgggtcatgcggcccagtgcagtctcggccacgatcatggtataaccaaaggtaactgccagcagaatgtataccagcaggaaaatgccgccgccgtatttggctgccagatacgggaagcgccagatgttgcccagacccaccgaagcgcctgcggccgacagcacgaacccgatcttaccggagaacgcgctgcgcttgtgttgttgttccatgttttaaatcctcttttcctatccgctataaaaattaagcaaaacaagtgtaccacatctgcggacaagtagcaagcaacagtacgaaatgccgcttgcacagcggcctttgggaacgtaggacgattggaaatatcctccgcttacgctctggatattttcagcggaatgattatttttatttcgcgtttgtcgcgctctgcggagcgctccaaacgcattttcacaaaaaaggttataaaggcaaaatgcagtttccaatcacgacccccagctgtgaaaaagtggctcagaaacgcccgcaggcgtttctgagccacaaatcaaacaaagcttatttccttaaacaatggccaaagcgcacgcggcggccattctaaatcgtccggctgtatccttacagcttatggtacttgcggtcctcttcctcgtagacggggtcgcaggtcaggtacatccccagacggttcagggtgctgctgtccacgctggaaagcagcacggtggagtgtacatcacagcccttgaggttgggcagctggtgcatggctgctgcggcaagctcgctggaagcagcagagctggacagggcgatcaggatctcgtcggtgtgcaggcgggggttcttgccgcccagatagttggtcttgagggtctggatgggctcaatggcagttgcgctgaccagatctgtctcctgcgggatgcccgccagatacttgagcgcattgatcagggcgcttgcggtagcacccagcagcggaccggtcttgccggtgatcacggtgccgtcgctcagctcaatggcagcagccggtgcgccgccggtggcttcgctgcgggcgtgcgcctgcttttccacctctcgtgcacccatggtcagcccggcctgattcatcagcagctccagcttatagcgctcgctctccttggcggtgccggtgatcttctgctggcacaggcacttgtagtaccggcgcacgatctccttgcgggaagcttcgcagcagactgcatcatccacgatgcagttgccagccatgttcacgcccatatccgtgggggacttgtaggggctctggcctgcgatcagttcgaacatggcgttcaccaccgggaagatctcaatgtcgcggttgtagttcacggtggtcacgccgtaggcttccagatggaaggggtcgatcatgttcacatcgttcaggtcggcggtggcggcctcgtaagccagattgaccgggtgcttcaggggaatgttccagatggggaaggtctcgaacttggcgtaaccggccttgacgccgcgcttatattcatggtacagctgggacaggcagaccgccatttttccgctgccagggccgggcgcggtgatgaccaccagcgggcgctcggtctcaatgtactcgttgcggccgtagccctcgtcgctgacgatgcgtgccacgtcgttggggtagccggggatcttgtagtggcggaaggtgcggatgcccagactgttcagccgcttttcaaaggcttccacctcggcggcggcggtgtacttggtcacacacacgctgcccacatacagccccacctcctgaaaagcgtcgatcaggcgcagcacgtccagatcgtaggtgatgccgtagtcgccgcgcaccttgctgctgatgatgtcctcggcgctgatgacgatgacgatctcggcctgctccttgagctgcagcagcatctgcagtttggagtccggctgaaagccgggcagcacgcgggaggcgtggtaatcatcgaacagcttgccgccgaattccagatacagtttattgtcaaacttcttgatgcgctcgcggatatgctcagactgcatggaaagatatttgtcgttgtcaaatcctattttcatcgttcgtttcctctctggtggcccggcacaccatacccgggcgttaaatcacaagcataagtataccacagcccgggatggggtgcaatgcaaaacaacgcgcagaatgcaattccggcaggataggccgttttgggcggtatcttgtcctgttttttgtgaaaatggcgcttgtgcaaacgtactcgccctctcaggcgctaacgcgccagattcccccttttgtcgctgcgcgacatcttcccccggagcgggggaagtccttcctcaaagggagagcccttggcaatccacgcaagcttcatctctttgccaaagcctctccctttgggagaggtggatttgcgaagcaaagacggagagggcgaggatgctgaccttgttacaacagttttttcgcgagagagtcgtagtggaaagcattcgcttgtgcaaacgcaaaaggggccgccgcggtgtgcggcagtcccttttgcgtttatggagaacttatccgtatggagaagagaatggcttgttactttacctcggcagactgggtctttttgacaaggctcaggatcactgcgcccagcacgctgcccacagccagcgccacgcagtacagcacggcgtgatccaccaccgggaacacgaagatgccgccgtggggtgcgcgcagtgcgcagccaaaggtcatggagagtgcaccggcgactgcagagccgataacacagctgggcagaacgcgcagcgggtcggctgccgcataggggatggcaccctcagacacgaagcacagacccatgacgtagttcacgatgccgttgcggcgctcgtccggcgtccacttgcgggggcagaaggtagtggacagggcgatggcgatgggaggaaccatgccgcccaccatgacggcagccatcacctcgtagttgccggaagcaagggctgcagtgccaaagacgtaggctgccttgttgaccgggccgcccatatccacgctcatcataccggccacgatagcgcccagcagcaccttggagctgccgcccagtgcgttcagccagtcggtcatggcggtgttgatcatacccatcaccgggttcacggcgcacatcatcgcacctacgataagaatgccgcccagcgggtagatgagcatcgggcggataccgttcaggctggcgggcagcttttcggtgatctttttgaggaactgcacgatgtagcccgctgcaaagcctgccagcagcgctgcaaggaagccgccggagatgccggtggtgttgcctgcggcaaggtcggtgaagttggtgccgttcatagccagcacgccgccggcaaagcctacagcaagacccggacggtcagcgatggacatggcgatgaaacctgccagaatgggcagcatatagccaaaggctgcgccgcccaccgtcttgaagaaggcggcaacgggggtgttcatgccgaagtttgcggggttgatgctgtaatcatccagcaggaaggccagcgcgatcataatgccgccgcccaccacgaagggcagcatatgggaaacgccgttcatcaggttcttgtacaggctgcggccgaagctgtccttgccggaagcgtcatcctcggctgctgcgccgccctcagcgtggaacacaggcacctcgccgtgggcgatcttcttaatgagctcctccggcttgtggatgccgtcatctacgcgggtgaacagcaccggcttgccgtcaaagcgggcagtatccacctttttctccgctgctacgataataccgtcacaggcggcgatctcggcgcgggtcaggatattctttgcgccgtccgaaccattggtctccaccttggtgggcagacccagcttgtctccggccttggtcagcgcttctgcggccatgtaggtgtgggcgatgccgttgacgcaggcagtcacagccagaatgcggtagccgtcctgcgggatggcctgctgggtaaagctttctgtgccgaactgtgcttcctcctgcgcgtcgatgcactccaagaactccttgggggtcttggctgctttgagcttttccacaaagtcctcgttcctcagcatctgcatcatacgcgccagcatatcaacgtgcaagctgccgttttccggggcggcaatggcaaacagcaggtcggtggtgccgtcatcctcggcgttatactgcaccggggtgctcagccgcagagcggccagactggggcgggtgaccacattggtcttggcgtggggcacggtgatgccgttgtccacataggtagagccctcggcctcgcgggcgtagagtgcctttttgtaggcctccttatcggtgatgttgccgtgggtagcctgcagttccaccagacggctcaggatctgctcctgcgtctgcagcgcttcgtccagcgcaatggactgtgcggtaaataactcggtaatgcgcataaacgttcctcctttgttccttttatcctatcaaagctgcgccagcagctcgtcgatcttctcctttgtggcaagcccaaggctgaaagccgttgcgctgccgcaggcggtgcccagacgcagcgcctgcgcgtagctgcggctttgcagatatccggccacaaaaccggccaccatgctgtcgcctgcacccacgctgttgaccaccttgcccttggggcagccaatgcggtgcacctgtccctgttcatccagcagcagcgcgccgtcccctgccatgctcaccagcacgttgcgggcgcccttttcctgcagagtgcgggcagcggccacgatctcggcatcagtggtcagcaccttgcccacgatctcgcccagctcatggttgttgggcttgatgaggaaggggtggtagggcagcacgttcaccagcaggtcgcgggtggcatccaccactgcgcgcacgcccctgccctgcagccgcgccagcagccgctcgtagacgctttgcggcaggcttgccgggatgctgcctgccagaatgaggatatcaccctcggccagcttgtccagctgggcttccagctgctgcaacgcactttccgggatggcagggcctgcgccgttcagctcggtctcctgcccggccttgatcttgacattgatacgggtcatgccgttttccagatgcacaaagtcggttttcagtccctgcgccgccagaccgcgctccagccatgcgccagtctcgccggccacaaagcccagtgccacgctctcgcagcccagctgcgccagcacgccggacacgttgatgcccttgccgcccagcacgcaatcctcgccttgggcgcggttcactgcgcccacctccagcggtgcgtccagacgcacaacgtagtcgatggccgggttaaaagtaacggtgtagatcatacttctgcctcctttacaaatgtttgctgcttatacttagggttcgggcagcggttggtcaggatcgcaccgccgtgcagatccgtgatgaccgccggataaattttggcaaacttggcgtcgtccacaaggaaccagctttcccttgcgcggcggacggctgcggcctttaccgctgcttcctcggggtccggggtggtaaagcccgcctccagcgccacgccattggcacccataaacgctttggtgaagttatactgctggatgctgctgaccgccggggcccccacgatggcttcggtctgggggcgcagcagcccgccgggcagatacacccggcagcccttttgcgccagcagccgggcgtgcgccacgccgttggtcacataggtagccttgagcgccgcacccgtcagcgcccgcaccagctccagcgtggtggtgcctgcatcgatgaacacaaaatcttcggcggtgatgagcgctgcggcggctgcggcaatgctgcgcttttctgccaccgccagcgtctccttggcttccatggtgggctcgtctgccagaaagcggctgtccggcagggtagcccctccgtgcaccttggtcagcctgccctgccggtccagctcggtcagatcgcgccggatggtggattcgctggtgtgcagcgcttcgcacagctgctgcaccgtcacggtgcgcttttcgttcagctgttctaagatcagtgcaaaacgttcctctgccagcatggtgtctttccccttctttccttcctacgtctgaccggttttgcacggtcttggcgtattttggttgtccgtagctttattatagcaaaaagtcagtcaaaatcaatcatttttagtcgttttcgctcacaaaaaatgtcctcgatttttgtgcacggttgctaacatctaggatacaagagtgtctttacgccaaaaaagaccaccgcacttgggtatacggtggtcttttttgcgtttatttgaccggtcgcgaccggttttggtgctcaggctggtttcaatcaggcgtccgagcgggagtaggcgttcttcatctggctgctcagctcaaacaggaccttgtccagcgtgtcggcggccttctcctgcagcatggcggcaatggcggtgttggcttcctcccgcagggcggcgcggcgggcagcgtccggctcggcggcaagctttgcatcgtactggttcaccagtgcgcggccggcagagagcacggcttcctcgtagcgctcgaggtggaacagggacttgttataggaagcatctgccatggcggcaatcaggcggctggtccagtagaagttatcggtggacacagtgccggtggtgtttgccagatactccggggtgcgctccacattggcgtagaagggcaccatggtgttgaaagcgttggatgcataggccacccactccactgcgcgggactcctccggctggtcggggcgcatctgcagcagtgccataaagtcgttgcggttgatgccgatagaacggtatgcgccctttgcggacttgtcgccgtagctcagataggggtcgtagggtgtgccctgatagtggctggacagcatatacttgatgtcctccggggtcaccttgcgctccggcaccatgcaccacggcaggtcatcggacatgggggtgtagtcggcatcggcaccctcccacacccatgtgcgggggttgaggtagcgcagcatataccatgcgcggggggtgttgtaaacgtggtcggcgtcatcgtggctgccaaaggcgtcccgggggttcagtgcgccgtccagcgagaggtcgaggtggttcttggcaataaactcccgcaggtcggcggagcagaggtagttttcctgtgcgccgaaggcatcttccagatcaaaggtgtcgatgcccagttggttgggcatgaccacatacacatcgtccggcacgcggcgggcgatccagtggtgaccgccgatggtctccagccaccagatctcgtttacatcctgaaaagcgatgccgttcatctcgtaagtaccgtactgctccagcagactgcccagacgcagcacgccctcgcgggcagagcggatgtagggcagcaccagatagacgatatcttcctcgccgatgccgccgggcacctcaggcttttcgcccttggcgggctgatactccaccagcgggtctgcgcccagcacgcgggggttggaggtgatggtctcggtggcggtcatgcccacgttagcggcattgacgccggaagctgcccagatgcccttgccctccacggcgttgggcatggcggtaaaccgcaatgcgccctccggcagggggatttccacatgggagaggacgctgcggtaggtcttgggaagctcctccgggtggatcacggtgaattttttagcggtgaaatggccggagccggagtcatcgttgcgggcgatcatggtagagccatcgtacgatgctgccttgccgaccagaatggtagtgcaagccataggttttccctccatattctataatgtgcttctattgtagaacttttgcagcggaattgcaaccgggacgagctgaaatccttattgtaccccctcaggctcactacgttcgccagctcccccaaggggacgcctttgcgctatgccggaaactttcccgctaccgccaaaagccgtccccttggggaaggtggcttgacgcgaagcggcaagacggaaggggtacatcgttccaaaacaaaaaaccgccgcgctgcgtaccacggcagagcggcgggagatggaatgctatttcaggctgttactgggctgtccagtagaagtcctcgccgggcagcgtaccgcccacggcggcggggtcggcattgtagagcacctgcaggtaaccggagacgtccgccttcagttcctcgccggtcaggcagacgatgttgcagttgggcagtgcctttttggcgatggcggcttttgccaccacgccctgctcctcgcacagagcggcggtgccgtccagatcggtgttggcggcgttcacgctttgggcgtaatctgccagaaaagcggctaccacgtccgggtgctcctcggcgtaggccttgcgcaccacggtcacaccggtgatcagctgggtgtctgctaccttgtcccactcggcggtcaggtcaagggctacccgcagggtgtcgtccttcagcccggcagcggtcacatagggctggggcagcaccgcaatggcgtcctgcgtgctggccatctgggcagtcacctcggtagcttcgctgtaatactggatgtccacatccttgtccgggtcaaggccgttggcggtaagcagatagcgcagcacatactccggggtagtgcccttgccggtggacaggatggtgcggcccttgaggtcggccatgctgtggacggtgtcgccctgctccaccacatacagaacgcccaaggtgttcactgccacggcctgaatgccgccgttagttttctggtacagggttgctgccagattggccgggatagcggccatgtccagctcgcccttgatgagcagcggcacgatctcatccgcagcgccgtaaagctgcaaatcgtagtccatggcggcagtgccggcctgctccatcgagagcaggttgacaagccccatggtggtgggacccttcagcccggcgatgcgcagcggctcggtggcagacagcggcgcagcagtttcttcctcggaagcagccgcagaggaagcagcttcggacaccgccgtgctggaaacggcagagcttgcgctgccgccgcaggctgcaaggctcagtgcaaggctgaacgccagcagtaaggacaggatctttttcatgatatactccttttcacacccggcacaccccggtacgggaagcggaaaccggtcttttttgaaaaattttgcaaaatcatttgctttgcgcgttccagtttactataataggggtaaaaataccgttgcgtgtgcaacgcaattgcaggaggctgcagagaacgttgttttctctgcggagttgcgatgaataattatctgccgctgttacaaaccaccacgctgttcgcaggtctttccgctgcggagctcagcacgctgctgtcccggctgggggcaagcgtgcgcagctacggcaagggcgaagcccttgtgctggcgggggaacccagccgccgggtaggcatcgtgctgtccggcgagctggaagcctaccgcccggcaccgggcggggcacgcatccccattgcccgggtagagccgggcggggtattcggggatgtgctgggaggctccagtctgtccagcccggtcaccgtgctggctgccgccccctgcgaggtgctgctgctgccctacgagcggctgctgctctcggacggcagccccgcccaccaacgggtggtgcagaaccttgtgcgcaccatcagcgataaatatttttccctctcccaccgcatcgacctgctggtgatgaagagcctgcgcgccaaggtggcggcttatctgctcagcgaagccgcccgcgcccacagcctgaccttcagcatccccttttcccgcatccagctggccgattacctcaactgcgaccgcagcgccctttcccgggagctgagcaccatgcagagggaagggctcatcgatacctaccgcagcagcttcaagctgctggagccggatgccttgcagcagatggtgcagtagccttttgccaactattttataattaaggagcaatcaagcaatgtccaagcctgttctctggatcgtgattccctgctacaatgaggagcaggtgctgcccattacagcacccatgtttctggaaaagatccacagtctgaccgcacaggggctggtcagcgataaaagccgggtgctctttgtcaacgatggctcccgcgacaaaacgtgggagctgatccaaggctttgccgcacaggacgagcactatatcggcatctcccaaagccgcaaccgcggccaccagaacgccgtgctggcggggctgatggaggcactgcacagcgacagctgcgatattaccatctccatcgactgtgacggtcaggacgacatcaacgccatggacgagatggtgaaaaaatatctggacggtgccgaggtggtgtatggtgtgcgcagccgccgggacaccgataccttcttcaagcggttcaccgccgagggcttttatcatgtgatgaacgctctgggcgcggatatcgtgttcaatcacgcagactaccgcctgatcagcactcgcgtgctggaaagctttgcggattacaaggaggtcaacatctttttgcggggcatggtgccgctggtgggctttgcccacgatgtggtcacctacgagcgccatgaacgtctggccggtgagagccactaccccctgagtaagatgctggcgctggcctttgacggcattaccagcctttccaacaagcccatccgcatcatcaccggggcgggcatcgtggtgagccttgtcagctttatcggggtcatctgggccatcgtgtgcgccgccatgggcagcagcgtggcaggctgggcgtccaccgtgtgcatcgtctgctttatgggcggtgtacagctggtgtgtctgggcgtgatcggcgagtatatcggcaagatctatatggaaaccaaagcccgcccgcgctatatcatctcggagcgcacatgggctccctacgaaaggaaatatcacggatgagcaagcaaagctggaagggcagcacccttctgaacccggagccgccggtactggtatcctgcggcgggctggataagcccaaccttatcaccatcggctggacaggcaccatctgcacccagcccagcatggtatccatcagtgtgcgcccggagcggtacagccatcagctgctgtgcgagagcgggcagttcgccatcaacctgcccaccgaaaagctggtgcgcgccattgactggtgcggtgtgaagagcggccgcgatgtagataaatttgccgcctgcggcctgcacgccgccccgggcagcgtgctgaccgactgcccggtgctggaggaaagcccggtcaacttggagtgccgcatcacccagcgcatcccgctgggcagccacgacctgtttttggccgaggtggtggcctgcgatgtggacgagagcctgctggacgaaaaaggcaagctgtgtctggacaaggcaaacctcatcgtgtacagccacggcgagtatctggcgcttggcaaaaaactgggcacctttggctacagtgtgcggaagaaaaagcccgcaaaacgtaagaaataacaaaaaggcgatgccgtgcggcatcgcctttttgttatttacttctcgtgcttgacccgctggatatccccaaggtcgtagggagtgttctggtaaacataatagttcagccagttttcatacagcaggtgggcgtgggcgcgccagcggaacagcggcggctttgcggggtcatcgtccgggtagtagttggcaggcacatggatgggcagacccttggctacgtcccgcttatactcggcatccagcgtgtacttatcgtactccgggtgaccggtgacaaagatctgccgtccgttctcggtgctcatgaggaagggcccggcggcgtcgctctcggccagaatgcgcagggcggcgcagttgtccacatcctcccggcagatgccggtatggcggctgtggggggcgtagaacacctcatcaaagccgcgcaccagcgggtttgccgggcgggtgacccggtgctcgaacacgccgaacatcttttccggcagcagctgcttgcgcacgccgtagtggtagtacagcccggcctgtgcgccccagcagacatggagggtggagtagacgttcgtttcgctgaagtccatgatctcgcacagctcgttccaatagtccacctgctcaaaatccatggtctccaccggcgcaccggtgatgatcatgccgtcgtagcgattgttcttcacctcgtcaaaggtcttgtaaaaagcctcaaggtgagcagccgacacatgggtggcagagtggctggcggtctgcagcagggtcatgtgcacctgcagcggggtgttggccagcagccgggcgatctgggtctcggtggcgatcttggtgggcatcaggttcaggatcagaatctccagcggacggatatgctgcgccaacgcccgctcccggtgcatgacaaagacgttttcttcgtacagggcatcaaaggcgggtaaggtcttggggatgatcagcggcataggatggttgctcctttgctagatgatccaaaaatgactccgcgttcgctttgccatcttcagaggaatcatgatttttgatttcacatttgtcgctgcctgttggccgcgacaaatgtattttcacgggagggaatcataccttatccagcgcctgcgcgatatcggcaatgagatcctcggcagactccagaccgcagctcatgcgcaccagctcggcgggcacaccggcggcagccagctgctcgtcattcatctgacggtgggtgctggaagcgggattcaggcagcaggtgcgggcatctgccacatgggtctcgatggcggcaagcttcagctccttcataaaggtgctggcagcctgacgtccgccagccagaccaaagctcacgacgccgcagctgccgtttggcaggtacttctgcgccagtgcgtggtaggggctgctttccagcccgcagtagttcacataggccaccttggggtggttctccaaaaactgtgccaccgccatgccgttggcgcagtggcgctgcatccgaacgtgcaggctttccagaccaaggttcagcatataggcgttcatgggggactgcatggagccgaagtcccgcatgagctgcgcggtggccttggtgatgaaagcaccctccttaccgaagcgttcggcataggtgatgccgtggtagctgtcgtccggggtgcacagacccgggaacttctcggcgtgcgccatccagtcgaacttgccgccgtccacgatggcaccgcccagcactgcgccgtgaccgtccatgtacttggtggtggagtgggtcacgatgtccgcgccccactcaaaggggcggcagttgaccggcgtggggaaggtgttgtccaccatcagcggcacgccgtgggcgtgggcggccttggcaaacttttcaatgtccagcacggtcagggcggggtttgcgatggtctcaccgaacaccaccttggtgttgggctggaaggcagcgttcagctcctcctcggtgcacagggggtctacgaaggtggcagtgatgcccatctttgccatggtgaccgaaatcaggttgaaggtgccgccgtagatggtgctggaggccacgatgtggtcccctgcttcgcagatattgaacagggcaaagaagtttgcggcctgtccgctggaggttagcatggcggcagtgccgccctccaactcgcagatctttttggctaccatgtcgcaggtggggttctgcagacgggaatagaaatagccgtctgcttccagatcgaacagcttgcccatgtcctcgctggtggcgtacttgaaggtggtggactgaatgatggggatctgacggggctcgccgttgccgggggtgtagccgccctgcacacagatggtatcacggttcatacaacatactcctttgctggttttttggtcgggaaggacgattccccgcaggagagctgtctccggcggggaatcgaaaattcaaagcttcttatttccgcaggcgcttatcgctcttggtggcccacaaagtacccacagactggaacgcctgcaccatcagcaccagcagcaccacacagacgatcatgatgttggtctggtagcggtagtagccgtaggacaaggcgatcttgcccagaccgccgccgccgatgacgccggacatggcggaatagcccagaatggtggtcagcgcggtggtcatactggagatcaggccaggcaggcactccgggatcatgaccttggtgatgatctggaagggagtagcgcccatgctctgggcagcttccactacgccttcatccagctcccgcaggctggtctccaccagacgtgccacaaaggggaaggcggcgaccaccagcggcactacggtggccttggtgcccaccgtagtgcccacgatggcgcgggtaagcgggaacacacagatcatcaggatgaggaacggcacactgcgcaggatgttgatgacgatattgatcagatgcatcagccagccgggcaggggcaggatgccatccttgtcaccggctaccagcagcacgcccagcggcagacccagcaccagcgcaaaggcggtggagagcaccgttacataaaaggtctcccagatggcaaaaccgtaatctgcgatattcatataccggtcacctcctctaccgttacgccagactggctgcgcatatactccatagcctgctgtgcgacagcaagctctgcaggcagcttgagcagcatggagccgtagcactggccgctcagatcacgggtatcggcgctgagcaccgacaccagaatgcctttttcggcagcaaggcttgccaccagcggctttgcagtggaggaaccattaaaggtaacgcgcaccacatggtcatccggcgcaaagcaggaaagatcccgcgctgcgctgccgccgttgggggctaccagacgcttggcggctgccgttttggggtttgcaaaaatttcctgtaccgagccctgttccacgaccacaccgccgtccagaatggccacgctgtcgcagatctcctccaccacgctcatctggtgggtaatgatcaccacggtgatgcccagtttgcggttgatatccttgatcagggtcaggatggagtgggtggtgttggggtccagcgcgctggtggcctcgtcgcacagcagcaccttggggttggtagccagtgcgcgggcaatggcgatgcgctgcttctgaccgccggacagctgtgccgggtaggcgttggccttatccggcagacccaccatttccagcagctccatggcgcgcttttcagcctcggccttttttacgcctgccagctccatggggaagcagacattcttcaggcaggtgcgctgcatgagcaggttgaactgctggaagatcatggtgatctcccggcggcgtttgcgcagcgatgcgggagacaaggtctccattgccacgccgtcgatcaccacactgccgccggtggggcgctccaacaggttgatgcagcgcaccagcgtggatttgcccgcaccggacataccgatgatgccgtagatggatccatcgggaatggtgaggttgatgttttgcagcgctttcaccgcgccatccttcatctggaaggtcttggaaaggtacttgagttcgatcacagaaattgctcctttagcttatccctcgatgatagattatccctcgatgggtgccagactgtcctgcttgccgccgtagatgcccatgggctctacgtgaataccggcaacggtcaccagatgggtacccttttcggcgttgaaattgtccagatacggctgatgctggaagtagttggtgtctacctgaccgtcctcgacgacctggttggggatcacatagtcgtcgtactcctggatgtccagcgtgatgcccttggcggcaaggatctccttgcacacctccagcacctcgcagtggggagcgggagtagcggcacagctgacggtctggccgttcagagcgtcataatccacagtggaatcatagccgtcggtggggttctccacaacggacaccacggagcccttgtaggtctcgtccatgaagtccttcaccttctggctctgcagggcagcagccagagccttgatcttaggctcctcctgattgccgtccttgcacaccagaatgttgacgtaagcagaagagccgtcctccatggccagtgcatcggtcatggggttcagaccggcagagatggcgtagttggagttgatgacggcgtagtcctcgtcctgcaggacgttgggcacctgagcggcctccacctcgtccacggtgacgttcagggggttttcctcaatgtcgttcttggtggcggtcaagcctgcgtctgccttcagcttgaagaagccgttcttctccagcagggtcagggcacgagcctcgttggtggtatcgttgggcacagccaccttgatcttgtccagcttagctgcggcagaggatgccacgctgccggatgcagcggcggaagaagcagtggaagaagaaccaccgcaggcagtcagggcagcggctgcggctgccacaccggtaactttcagaaaatcgcgacgagtaatcataattttgttccctctctatttgttctctattatgtactgcggcccgcacggcacctttccgcacgcggccttgaacggatccatgaaaaatgcccccgtccttacaagccttaggctctgcaaggacggaggcatgaacatacttccgtggtaccaccttggttcactgcatccttacgggtgcagcctcgatgctgcggcagcgtatgctgcttacagccggacgctgtaacgggcgcatcccgttgcgggcttagcactcctgcgcctcgtccgcacggctccgagaccattttcagcttcctgtttcctgccctttttcaccgcccgggctctctggtaaggatcaatgcgaaggcctactcttctcttcacagccatttttgtgatattgacactataataaacccatcggcagcatttgtcaacaccttcaacgaagtttttgggtagggatatggcttccggcctgccactgcgcccgttttgcttgacaatgcgcacaaaaaaggttatactataactacaaaaggcactgcgacaagcggttagccctttaggtttttggcttaacttttatcaaagaaaaaccgtcacctgccggggtggcggtttttactttcttaccttgatcgtaaacgtaaatccaaacaagtggaatgtcaaagtaataggcattttctcacctccttccggaagtgagggccaaccgcctgccgtatgtgcagtacctttcggtcacttttcagagacaggacgattataacatattccgacccttttcgcaagaaagctctggtgtttccagagctttttattatgtgctcttgtatgcggctggtgcacatgataaaatagggtatcatcttttgcaaggagagcaggcaatgaacagcagagacccttttcccgatgaagaactgcgccgccgcattatggattttatcatggccgcagggcagaccctgctggaaaacggcgcggaggtgttccgggtggagcagaccatggagatcatggcgcgcagcttccatctgcgggagttccacgtttatgtgctgaccaacggcatttttgccagcgccggcactgccgagatcagcgaagtgcgcaacgtaccggtgcgcaccacccatctggggcgggtggcggcggtgaacgagctttcccgtcagatcgcccagaccgggatgaccttagacgaggccgagagccgtctggtgctggcgcggcagctgcccttccctaaagaccatgtgcagctgctgtccgggctgtgcggggcgttctgctttgccatgatgttcggcggcaacctgcgcagtgcactggcagctgccggggcgggactggtggccagctggtatctgctgtggtgcgggcggcatgaagtgcccggcggcttccagaagatcagtaccgccgcgctgatcacgatggtgtgcatcctgctatgcaatctgctgcacacttctgccagccacgccatcatcggtacgttgatgatcctgaccccgggcatcgcctttaccatgggcatccgggactttgtgcagggcgactacctttccggcaccatccgcatgatcgacgctctgctcattgccgccagcattgccataggcaccggccttgtgctgcggctgtacacggtactcacgggggtggtcgtggtatgatgtcccttactgctgtacagatcagcgagctgaccgcgcagttttttctggccgcggcgggcacgctgagttttgccattctgtttgcgtgcccccggcgctgcctgccttactgcgcactggtgggcgctgtgggctggctgtggtacgaactgcttaccctgctgggcgcagacgccgccacggcctccctgctggcggtcattccgctgaccatcctcacccgcgtgtttgctatcactcaaaaaacgccggtcacggtgtttttgctgaccggcattttcccgcttgtgccgggcgcgggcatctactacaccgcctactatttcatccagaacgaaaacgcccttgcccttgccaagggcatcagcacctttaaaattgcggtggcgctggccatcggcatcagtctggtgctgtgcgtgccgctgccgaaaaagcggaaataatctgttgttttccacgctatttatataaaggagtgatctctatgaacgcaatagaacttctgactacccgccgcacctaccgccgatttgcgcaaaaggccgtgccgcaggatgtggtggacgatatcgtacaggccgtgcggctgtcctcctgcggggcaaaccggcaagcggtgcgtctggtgctggtgcaaagcccggagatggtggccaaggtacagccgctggtcaaatgggctggctatctgccgccggagcagggcacgcccaaggcagacgagctgcccaccttttatgcagcggtggtgcaggataccgccatccccggcgaccttgccaccgacaccggcattgcgctggcaaacatgacccttgccgcatgggacaagggcgtgggcagctgcatcatgggcgcgatcaacaagcctgccctgaccgcgctgctgggcatcgaagagccgcagaagctggcctttatggtggccttcggctaccccacccacaaagccggcatcgtccccatgaccgagcagaccggcgtaaagtactatctggatgaaaaccgcgactactgcgtacccaagcgcagcgcggaggagatcgcaagaagcgtataattgccacggtgcaagcgcaccccctcaggcgctaacgcgccagctcccccaaggggacgcctttgggctatgccgtaaactttaccgccaccacgaaagccgtccccttggggaaggtggcatcgccgcaggcgatgacggaaggggtttataccgcatatattcacacattttctccgttattgcataaatgtttgcaaaatcgtttcaattttacggattattatacacaagtattgactttttgttttgtacaaactatactaagtgcgttccccgaaagcgcgatgaatcgcatcccatcggggcaaagcaaactatattgcatagattgaggagtgtttgaatatgaaaaagatctctcgccgcagcttcatggctgccgctgctgtttccgttgctgctctggctctgaccgcctgcggtggatccgcaagctctgctgcttcttctgtggcaagctctgccgcttcctccgaggctgcttcttctgccgctactgctgaactgaccaccgtggaagccggcaagctgaccatggctaccaacgctgcctttcctccgtacgagatgaccaccgatgccggcgagttcgagggcatcgatgtggatactgccaaggccattgctgagaagctgggtctggagctgcagatcgatgatatggactttgacgccgcactgctcagcgtgcagcagggcaaggccgacatcgtgatggcaggcgttaccgtgaccgacgagcgcaaggctgtgatggacttctccgacagctacgccaccggcatccagtccatcatcgtgcccaacgattccgatattgcttctcccgacgatctggccggcaagacgatcggcacccagcgcggcaccaccggctacatctactgctccgatgacttcggcgatgagaacgtggttgcttacgacgacggtctgaccgctgtgcaggccctgaacaatggtcaggtggatgctgtggtcatcgacaacgctcccgcacaggagttcgtggctgccaaccccggcctgaaggtgctggataccagctacgccgaggaggattacgccatcggcatggcaaagggttctgctctggaggacgctgtcaacaaggctctggaggagctgaaggctgacggcaccctgcaggccatcgtggacaagtacatcaacgcaaactaagctgcgtgccttgtaccattcctgtacccaaggaggcgccccgctccggggcacctctttttttagaaaaaagtggttacaatttattgacaaacagaaagtgaggatgtgaatggctgcgcaatacgaactgctcaaagagctgctcaacagcggcacaaagctaagctttggacaggatttcttttttaagttttatcaggcctttctgctgaaggaccgctggatgcagtacatcaacggtgtgggcaccaccctgctggtcaccgcactagcgctggcgctgggcgtggtgctgggcagcgtggtggcactggtgcgcgtgacccacgaccagcagcgacccggccacaaaaacgcggtgctgggcttttttaacgcggtgtgtcagctgtacaccaccatcatccgcggcacgcccatgatggtgcagctgctgatcatgagcatggtcattttttccaacagccgcaactttactatggttggtgcactgaccttgggcatcaactccggcgcgtatgtatccgagatcatccgcggcggcctgatggctgtggaccccggccagatggaagccggacgcagccttggcctgaactacatgaccaccatggtggtcatcatcatcccgcaggccatccgcgcggtgctgcctgcactgggcaacgagttcatcgtcctgctcaaggatacttccctgatcaccaccatcggcggcaaggagctgctgtatgctgcacagggcattatgaaccgtacctatgaagccatgttccccctgctgggcgttgcactgatctacctgatccttgttatgctgtttacatggctgctgagcaagtttgagaggaggctggcacaaagtgaccgataagattttggaagtacgcggcctgaccaagacctatggcggcgtaaagaagcgcggcgcaaaaaaggccgaccccacgctggatgtgctgaaaggcatcgaccttgatatttaccgcggcgatgtggtgtgcctgatcggcccttccggctgcggcaagtccacctttctgcgctgcctgaaccggctggagactcccacctccggttccatcaagtttgagggtgtggaggtaaacgagacacacatcgatgccgtgcgccagaagatgggcatggtgttccagcacttcaacctgttcccccacctgaccgtgaaaaagaaccttgagctggcacccagcctgctgaagctgaaggacaaggacgccatctctgcccgcgcagacgagctgctggcccgcgtaggtctggctgacaaggccaacgcctaccccaagagcctgtccggcggtcagcagcagcgcatcgccattgcccgtgcgctggccatggacccggacgtgatcctgttcgacgagcccaccagcgcccttgaccccgagatggtgggcgaggtgctggagctgatgaaggagctggcacacaccggcatcaccatgctggtggtcacccacgaaatgggctttgcccgcgaggtgtccaaccgggtcatcttcatcgatgacggcaaaatccaggaggacgagccgccgcaggagctgttcaccaaccccaaacacccccgcctgaaagccttcctctccaagatgctgtaaagagtttttaaacagaatgccggacaacctgcgggttgtccggcattctgttttctttatttttcttacattacatccgtatcttctgcgcggcgcgggcgatggaggcaagcagcgccacaaggcgtttttcgtccatctgaccgcagtagctggtaaaggtgtagtaacacccctgcacgcagaaggacagcaccaccttgcgcactacgtccgtctcaaaggtggggtcggtctgggcgatgcaatggcacatagcctgctccacccggttgatgaacagcccctgccgggagccggagaacagcacggcgatctcctcccgatgctcggcaaaggcgcggaacatctcccgcgcaagccactcggtacgctcgctcacatcgctggcggtcaggcggggcaggctttccaccaccgcctgtaccatctcgtcctccatggcgttggccagcgcatagatatcctgataatgggcgtaaaatgtggatttattgatgcaggcgcggtcgcacagctccttgactcggatcttctccaccggcttttcgcggcgcagctccataaaggcctgtttgatggcgcgctcggtcttttcaatgcggatatccagaaaacccacctcttttgcttttttgttgattttccaacatttttccggttttgcggatagacaagccccgcaagcctttttatactgggtataagcgccgcagcgttactccttgcggtacaaaagcccctgctgctccaaagctgcgtggatgcgggcaaaggtgtccttatccgggcagcgcaaagtgtgcaggtgcacgccgccggtcatgcggctcaaaaggctctcgggcgcatccgccgcctgacggataaagttgtccacgtcgtaccggttgcacaggttcagcgtggcgcggatctcgccgtacaggctgttttccaccgccacatccaccactgtgccgccctgatccaccacagtgtacagctcccggcgcatctcctcctgcgtgcggtgcacacaggccagaatgccggtatagcccttttccgccgggtgcagctgatagccccggggggtggcatcgatctgcgccccgccggcgcgcagcagtgccacatctcctaccacgatctgccgcgacacccccagctctgccgccagcgtgctggcgcttaaaggagcaccggcgctgttcagccgggtcaggatgcgttctctgcgctgtgctgcattcataggggttcaggcttcctttccgtaaaacaacttttctctccttattgtagcaaaacgcggcgcaatgtgcaaggttattccaacagcagacttccgaaaaaaggcttcccccggaagggggaagtctttccccaaagggtgaaagcttttgctccggggcaagcctcaagcgttgctttattctacccgcagcagggtggcgtaattggagggcagctgcaccttcatgcggttccactcagtagagaccagcacttcctgtgcgcctacggtgtccgccatcagatcggtgactttggcagcttccaccggcagctggaactccagctgtgcgggagtatcgccgttattcagcaccgctaccaccgccttgccgtccagcacccgggcaaaagcatagcactgggtggtgagctgcagctcttttacctcgccgtaggtcatttccggcaattcagccttgcatttccccagaactttgtatacactggtaacaggatttgtgcgttctgcatcagcgtagtcgctaagctccagacaggggcgcagcggccagtcgctgccccactcctttttgccctcgatgccgaactccgagccgtagtagatggacgggatgccccacaggctgtacaccagaatggcgatgtgccggatgtgctcccggttgcgcagcttgttgggcaggcgctctacatcgtggttatctgagaagagatacagccgggtgtcgtggcacagcccctgcaaccggcgcatggtgtgggcaatttcaaaatagttgtggtcgttgtggccgctccacagacccttgtgcagctcatagttggtgaccgagtgcagcatttccgggtttgcccagcggctgtaatcaccgtggatgacctcgcccatcagccagaactccggttttacctcgtttgccagacggcgcagcccgcgcatgaagtcgaagtccagcacgtcggctgcatccagacggatgccgtcgatgtcgaactgctccacccagaagcggacggtatcataatggtactgctgcacctccgggttgcgctggttcagcttgaccagcaggttgtagccgccccagttgccgtaggaaaagccatcgttatactcgttgttgccccagaagttcacatcgcagaaccagtccttatagcgggcgttctcgcggttcgacttcaggtcctggaacgcgaagaaatcgcggcccacatggttgaacacgccgtccacgatgacccgctgtccgcgggcgtggcaggccgccacaaaggccttgaactcctcgttggtgccaaggcggcggtccaccagacggtagtcgatggtatcgtagccgtgggagccgctctcgaacagcgggccgatgtagatggccgtacagcccagctttgccgcgtgggctgcccatgcttccagctttgcaaaagcgcccggggtgggctggccgtcgttttcgtgtgcgcagccgcacagccccagcggatagatgtgataaaatactgcttcgtcataccaagccatgatcgttcgctcccattctattgcttaaaaagttgcgccgcttgcacggcggtagcaacagtataccacaagatttggcaaatatgtgaaaatttgccgatttttgtcaagattcgctaagattatcggctatcatgccggtaaatagccgtttttcttggatagtttgcccaaatagctttgtaccaaccggcgcacggcgcgccggtcaacatagagaagtaaggagatctttgcatgaattaccctgtgatcccccgcacgtttttcagtggcgactgcttcgatgcctaccgcattctgggtgcgcacccctgcaccgacccaaacggcgccgagggctggcgttttgccgtgtgggcacccggtgccactgccgtggaggtgtgcggcggctttgacggctgggagcgcggcgtgcccatggaaaaagccgataccggcgtgtggagcgcctttatccccggccttgcggagggggacctgtacaaataccgcgtgcacggcgcggacggcagcaccgtgatgcgcagcgacccctacgcctttgccaccgagctgcgccccggcaccgccagcaagctgacaaagctggatttcacctttgacgacaccgcgtggatggagcggcgggacaaatgccgcaaccgcccgctgaacatctacgagctgcacgccggcagctggaagcataagcccggcactacccagccggacggctcggacgggtggtacaactacgaggagctggcgcgggaactgatcccgtggctgctggagcatcactttacccatgtggagttgctgccgctggcagagcacccctttgacggcagctggggctaccagaccaccggctacttctcggtgaccagccgctacggctcccccgcccagtttgccagctttgtcaacgcctgccaccgcatgggcatcggcgtcatcatggattttgtaccggtgcactttgccgccaatgctgacgcgctggcaaagtttgacggcacccacctgtacgagtacgacagcgacgtgggtcagagcgagtggggcacctgcaacttcaactactaccgccgggaggtgtgcagctttttgagcagcgccgccgggctgtggatggacgtgtaccactgcgacggcatccgcatggacgccatctcccgcgctttgtactggcagggcgaccccaaccgcggcgtaaatcagggcgcggtgaactttttgcgcagtttgaaccacggcctgaacgagcgctggcccaccggcatctacatggcagaggactccaccaacttcctcaaggtgaccgctcccacccgctacgagggcgtgggctttgactacaagtgggacatgggctggatgcacgacacgctggactactttgccacccccttcggcgagcgcccgggctgctacggcaagctgctgttcagtatgcactacttctacaacgagctgtacctgctggcgctgagccacgatgaggtggtgcacggcaaaaagaccatcattgataagctgtggggcagctacgcggaaaagtgcgcccagctgcgcaccctgtacttttatatgtacacccatcccggcaaaaagctgaactttatgggcaacgagctggcacacttccgggagtgggacgaaaagcgggagctggactggaatttgctggaataccccttccacgatgccttccagaaatactttgccgccctttgccgcacctacgcctccgagcctgcgctgtatgacggcgagtacaacccggactgctttgagtgggtggcaaacgaaagctgtgccgagggcgtgtacgcatggctgcgcaaggggcgcgggcagaacctgctctgcgtcatgaacacacagaacagcgcccacaaaaagttccctctgtacctcaagttcccctgcagcgcagagctggtgctggataccgaggccggcacatggggcggcgtgcacaaggcgcaccgcaagcagaacttccacaccaccgacggtggtgtgtttggcagggactacaccctaacgctggatctgcccgccatgggcagctacctgctgcggcttaccccggaagcccccaacccggacgccgcccgcctgagcgccaacaaggcgctggcgcaaaagcgcaaggcggcaaaggctgcaaaagccgccgcagaagtttccaataagtaatatttgtgtaaaaatgtcccgtctgctttgaaagcgacgggacattctgcatttttcgccgccggggtgctggacagtgcctaagcgaattgttatactgtagaatgtgaaactttgcaaggaggatcttgttccatgaccgatactatcacaaagccccgcgtttccgctgcggcgaaaactgcgctggtgctggctgcagcggcggtgctgctggctgtttttgcgctggctgcgcccggcagcagattcttttttccgctggtgagcctgtggtgcaacttagcgctgtttgcctgtgtgctgctggtgctgcgggtagcagggataaaatttgacctgttccacaaagcggtgatcgtcggcctgtgggcggcggcgctgatctactttttctgggcgctgaaccgccgcagctttgtatacatctgggattattttaactatatcaacaaacagtacggtgccgaggccgcctttttgcaaagcccggcggctggcttccattacatcttcggctcttttgccgaggactataccaacttcatcaccctgtttctggattttcccttctgcctgagcgaccgcaccggcgacagctttgccttctgtcaggtgttcagcatcctgcccatgctgctggtgctgctggcagggcttaccatcaaggtggggcagatgctgcaggtgaagaaccgcttctggtactttcttattggaatgtcgtggatggtcacctacccgtggctgcgtatgagtgccatgctcagccagccggactggttcggcctgatcttcggcttcagcatcctgctgctcacgctggatttccggtttgaaaaactggagccggtgcgcttttgcctgctgtttgctgccacggcagccatcatcctctcccgccggtggtacttatattttgtagtgggctactactttgcctacgcggtgctggtgctggtaagcagcgtgcgcattgcccgcgccgggcagaaaaagcaggcgcttttgcaggtgcgcaatctggtgctgttcgggctgatgtccatggtggccatgctggtgctgctgtggccgatggtcagacacatccttgcttacagctacgccgaccgctacgcctactataacggcggcggcatggtcacggagatctacctgcaatacgcccgcatgggcctgatgaaccttgtgctcatcggtctgggcctgtggttctgcctgaaagtgcacaaaatgcccgcgctgccctgccttgccgggctggagatcctgctgagcatgctgctgttcacccgggtgcagaccaccggttcccaacatatgctgctgttcctcccggggtggtttatcctgtttttgctgggcgctgccgcgctggccgagggcatcacccgccgccggaacctgaagatcggcttctggctgttcaccatcgcctttgccacctcggtgcgctgctccccgctgaccaccgtcgctctgccggattttctcatcggccgcactattctctcggcctctctgcaggagagtgcccgcgattttgccgccattgatgacctggtctatgaccgcaaggatctgccccagatcaaggccattgccaactggatcgacacccactgcgccgagggcgagatcagttacatgatcccccacgacacgctgtactgcccggatcacttcaagaactgccagctgcccgcaacccccatcaacgataagctggccttcggcttctcggtgccgggcacccacaacttccccatgcagttctttgaggcaaaatatgttctcaccgctgatcctttcccgctgactcatgtaaatgaccctgagaacgagatgtcccacaagctgaacgagaggttcctcgcggtgcgggacgaatactttgcgctggaggccacctttgatatgggcaacggcaccacctttaccatctggcggcgcaccgttgcccccacccgcgccgaggtggagtactacctgagcgcctttaccgaggaagatgccaaatacccggagatgttctcccagatcgcagaaagctggctggctgcccgcgggctgtaacgccgcttttataaaaaggagtgttcgactatggaacaaactgcaaacaccatacccgctgccgccttggggcagtacaaggggcttgccttcacccgccgggtgcgcccggtatcggaaaaggccgtggaagcggatatcggcaatctggcgcgtgtccatgcgccctttgtgccgactggtgcccccgccgcccgcgggatgcgggtcacgctggatttcgagggctttctggagggtgcacccatcccggacagccggatggagcaggtgaccgtggtgctgggcaccgggcagctgatgcccgccgcagaagaagcggtgtacggccactgcgcgggcgagactttccgcttcgacttcacctaccccgccgagttccgcgtgccggagctttccggcaaaaccgcacagtttgagatctgcctgcacacagtagagcgcaaacaagtgcccccggtggacgatgcccttgcaagatccctgggctatgacgatctggacgccctgcgggagagcctgcgggagaaaaagcgtctttcccacgaagccaacgccgaccgcattgccggggcggcgctgctggatatggcgggcgcaaacctgaccgtggagctgcccgccgaactgctggcgcagaacgccgaataccagatgaaccagctgcgccagcggctgcgcaagagccagatgaccatggagctgtactgcaagagcgccgggctgaccccggagcaggtgcgggagggctaccgcagggaagccgagcgtcagctgcgggcggtgctggcggtgcgcgccattgccgaagccgaacagatcaccgtgacccagcaggaggtggacgccgagtacgcccgcctttccaagctgcacgacaccccggaggaagagatccgcaaggtgctcagccgggacgccgtagccgccgccgtgaccaaccagaaggtgcagcgcttcctgctcgaccacgccgcacttacctctgttgtggaaaaggagtaaagaccatgggcttttttaccagaactgcaatggatgccctgatgaagaccacccatccagagatcaaccgccgccaatgctggaatttgcacccccaccgcaagccctgcaccacctgcaaggatatctgcccctacggtgaggaaattttctcccgcccgaaccttgtcaaggactgggacccctgcaccgactgcgggctgtgcgtttccgcctgccgcagcggctgcattgcaccctcgccggagcaggtgcagcgggataccgccgcagcggactccgacagcgataccatctggatcggctgtgaaaagtctgcccgcaaaaacaccgtggtgcgcagctgcatctgtgcgctctcgtgggaagcgctggcgtatctggcgctgaacaaaaagatcgtgctggacctgaccccctgcggacagtgcgagaacgatctgtgcgccgagcagctgcgcaaggagctgacccgccttgtggactttttcggtcagccgatgttcgaagcgcggttctcgctggcgtatgaggaaaaagagtacccctaccatgtgcaggaactgacccgccgtgagatgctggagcaggtgagccacggctccaagagcggcaccaaaaagctgctgcaaatgctgcccggtctgcgcagcgaagaggacagcggggtggacttccgtctgctgctgcaccagcgcacaaagcagctgaaagccgccatggaaacgcccctgcagtacggctactatatgcccaaattcaccgataactgctttggctgcggccggtgcgaaaaagcctgccgtgccaacgctatgaagtttgaggatatgccgaacggccagacccgtatggtgcttaccccgtggaagtgcagtgagtgcggcgtgtgcatgaacgtgtgctccaacaagggctttgacggcatgaagctttaccagctgaccacccttggccccgtggtgctgcacaagtgcaccaagaccctgtgcaaacagtgcggcaaacccattgccccggacagcgccgagggactgtgctcggtgtgccgcatcaaggcacgtacccagaagcggcaggaggaagcgcgtctgcgcgccgaacagctgaaggctgagcgcgccgccaaagccgccgaggatgccgccaaggcagcggaaaacgctgtggaatccaccgccgaagctgccgctcagaccgcagagaccgccgctgccgccctgcccgataccatccccgccgggcagagcgcttcccctgccaacgtcactgcgcccagtctcggaaagcaggtttccgaataatagccggacgatttgacgattcagaatgcgctccgcgttgctttgcgcataaatagcggaaaaaagatttttattttcgggatagcggagcgcctgcgggcgctccgctatcccattttcacgggaggggtcagtccctgccccggtggaaactatttgacgttgcgcccaaacaatgctatactgggcttaaagttaccgttggtagccgatggacttgttacagagaggtaacggatgtggttccgttacctcttttttacaaagagcgaaagaggtttttatgatgcatcatgctttttcccgccgtcagtttttgaaggccggcggtgcagtagccctttccaccgctgctgccgggctgctgagcagctgcggcggctcctctgcgggcagcactgccgcaaccggcgacagcaccacctacaccgtactatatgcccgtcagcccgccaccctgaactacctgatctgctctgccgacccggacctgtaccacggcacccactgcgtggacacgctggtggagtacgacagccgcggcaagatccgcgaagggcttgccaccagctgggagtgggacgccgacaccctgacatggactttccacctgcgggacgagaactgggtggactataccggcgcagtgctgggccccgtgaccgcgcaggactttgtggacgcgctggcttatctgctggacccggactacgcttccggcactgccagccttgtcaccccctatgtggccggggctgaggactactataactactgcgtctggcgcaacaacgccaacaacggcactgtggccgaggacggcacccgctatgccatcgacgccgcaggcaccgtgaccctgaccgccgccgatggcagtaccaccacctgccctgctgtggatttttcctccgtgggcgtttgtgccgtggacgagcacaccctgacctatactctgaactacgacttcccgggttttttgagccttttgaactatgcccccttcgagcccgcctacggccccatgctagcggaactgggcgaccagttctgcaccagcgccgagaccgcctgcaactgcggtgcgttctatctggcggagtacaccccgctggaaagctgggtgatgaagaaaaaccccgaaaactacgataaggacaacgtgtacatcgacaccatccgctacatctacaatcaggaggcgctcatcagcggcccggagatggtgcggcgcggcgagatcgaccaggccaccatcagctcggacattctggacagctggctggcggacgataccaccaaggacatggtgtccatggagcgcccggagaccggcaagagctacttctatttcttcaacttcctgccctacgcccaccagttttccaactggaacaccaccggcgtggacgcccagtaccagccggacaactgggccaaggcggtgaacagcaccaacttccgcaaggcattcctctacgccatcaaccccgccgtcacgctggcggtcactgcgccggaagggtacgagaactacaagctgcacaccatcaccccgccctccttctgcgcaaacagcaagggcgtggactacaccgaatgcggcgcgcttgccaacgtgaccgaccacttcaacgaagccaccgccaagcagtaccgtgacgccgccgtgcaggaactgaccgctgcgggggctaccttccccatcaaggtacagtacccctacaaccccgccgtggtggactgggacaagcagtgtcaggtgttcaaacagcaggtggagggcgtactgaacgatggtttcgactttgtggagattattatcacgcaggggccgtcggataactttttgaacgcagtgcgccgcgcgggtgcatacgagttcatgtcctactactggggcgcggactactccgaccccgagaccgaggtgtaccccttctatcaggaagcgggcgaccggggcacctgctacgcctttctgcgcaccggcgtggaggacggcatcatcaccggcgagactgccgactatgtgatgacctacatggacatggtggaaaaggccaaggccatcactgccgaccttgacgcccggtacgctgcctttgccgatgccgaagcgtacctcatcgagaatgcgctggtcatcccgctcagcttgccggtgccgccctacatcgccacccggctgaacctgtgggaggggcagtacgcccccaccggcttttccaccaaccgtctcaagggcatccatatccttgaccattacgtctccatggacgagtataaccacaaccgggatgcacggtaagggctagaaaaagagaggtgcacaccatggtgcaatatcttgcaaagcgcatcgggcgctcggtgctgacgctgtttatcatcgtgacgctggtgttctgcctgctgcggctcatgccggtggagggctactttgcaaactacgaaaaaatgtccgaggcgcagatccaggctgggctgcaggccatgggacttttagaccccctgccggtgcaagtggggcgcttttggagaaacgctttgcacggcgaccttggcgtgagccatatctataaggtaaacgccccggtcacccagatcttagcccagaagctgcccatctccgtacagatgggcgtgctggccatgctgctcagccttgtgctgggcattccgctggggcttatcatggggcagtacaagggacgctggccggataagctgggtacggcgcttatcgtgctcattcaggctgtgcccgctgcggtgtactttttgtacatccagatgtatggtacggcggcggtgggcgtaggcctgctcttcaacgccgcaaactggcgctactgggtgctgccagtgtgcagcatgagccttgcaaaccttgccttttacgccatgtggctgcgccgctacatggtagacgaaagcaacaaggactacgtccgtcttgcccgcgccaagggcgtgtgcgggcgggatatcgcgctgcatcatgtgttccgcaatgccatggtgccgctggtgcagtatatcccctcggcgtttctcaatacggtggtgggttctatctacatcgaaagcctgtacagcatccccggcatgggcgggctgctggtcacctgtgtgcagcgccacgacaacaccatggtgcagggcatcgtgctgctgtacgcctgtgtgggcatcgtggggctgattctgggcgatatcctgatggtgctcattgacccccgcatcaattttggcaagaaggaaggtggccgctgatgttcaaacgcgcgtgttcccgtcagctggaagcgcagctgaacaccctgcaaaaggacggccccgccgcgtgggtagacctgccggaggaggagcttttcacccccgccgggttcagcagccagcaggcggaagccactgccagcaccagttacagctactggggcagcactttccgtgccttttttaaaaacaagcttgccgtggcgctgctggcagcgctggcggcggtggtggtgttcgcctttgtgcagccgctgctgcccgggcaggcagacccgaacctttgcgccgtagaccccaccaccggcatccagtaccgcaacatcgccccggggcagcagggctttctctggggctccaactccatcgggcaggatttatgggcgcgcatctgggcgggggcgcgcaccagcctgaccatcgcctttttcgtggcggtcatcgaagccgccgtgggcattaccgccggtgtgctgtggggctatgtgcgcgggctggattttctctttaccgagctgtacaacatcttcgataacatccccaccgccattgtgctcatcctcatctcctatgtggctacccccagcatctggacgatgatccttggtatgtctatcaagggctggatcgagatggcgcggttcatccgcaaccagatcttaattatccgcgaccgggactataacgttgcctcccgctgcatcggcacgcccactttgcgcatcgtgctgcgcaacctgctgccgtatctggtttcggtcatcatgctgcgcatggcgctgaccatcccggaagccatcggcaacgaggtgttcatcacctacatcggccttgggctctcggtggaaacgccctctctgggcaatctggtgaacgatggccgcaaggtgatgatgcaggcaggactgcggtaccagctgctctaccccaccctgattttaagctttgtcaccatcgccttttacctgatcggcaacgccttctcggacgccgccgaccccaagaaccatctgcagtaaggaggaagccatgacccaagaccccatcctctcggtgcgcggcttgcagatccggttcgggctgcgcgggcgcaccctgcacgccatccgggacatcgacctcgacctttaccggggcgaggtgcttgcccttgtgggcgagagcggctccggcaaaagtgtgttcaccaaaagctttatgggcctgctggacgcgaacggcagcatcaccggcggcagcatcgactactaccccacccccggctgcgccccgctgcaccttgcggcgctgaaaactgaaaaagagtggcttgccgtccgtgggcgggagatcgccatggtgatgcaggaccccatgaccagcctgaacccgctcaagaccatcggcgagcagatcaccgaggccgtcaccctgcatcagggcttaaagggcgctgctgcgcgggaaaagacgctggaatacctgcgggacgtgggcatcccggaccccgcgctgcggtacaagcagtacccccacgagttctccggcggaatgcggcagcgggtggtcattgccattgcgctggcgtgcaacccgaaaattctgctctgcgatgagcccaccaccgcgctggatgtgaccattcaggcgcagatcttacagctgctgcggcagatgcgggcaaagtaccacctgaccatcgtgctcatcacccacgaccttggtgtggtggcaaaccttgccgaccgggtggcggtgatgtacgcgggcgacatcgtggagatcggcacggcggacgaaatctactacgacccccgccacccctacacatgggcgctgctgtccagtatgccccagatgggcgtgaagggcgaggacctgttcagtatcccgggcacgccgcccaacctgttcgcggagatccgcggcgacgcctttgcgccccgcaacccgcaggcgctgaagatcgattttgtcaagcggccgccctactttgcggtgtcgcccacccacaaagcgcgcacatggctgctggacccccgcgcaccccacattgagccgcccgctgcggtgaaaaagctgcaaaaggaggggctgtgatatggcagagccgttactggaagtaaaaaatttacaggtgacctacggcagcgggcgcaaagcctattctgcggtgcagaacgccagtttcaccatctataaaggcgagaccttcggccttgtgggcgagagcggctccggcaagaccaccatcggccgcgccatcctgcgcatcctgcccaccaccggcggcgagattttatacaaaggtcagcgtatcaacggcaaaatttcccgcgcgctggataagcagctcacgcgcgaaattcagatgatctttcaggacccgcaatcctccctgaacgaacgcgccaaggtgagctacatcgtgggcgagggtttgcagaacgtgcgcccggagcttaccgccgcgcagcgggaggaaaaggtgcggcaggcgctgttggacgtaggcttgctgccggagtttgccagccgttttccccacgaattttccggcgggcagcgccagcgcatcggtatcgcccgggcgctgatcgtagagccggagttcatcgtggcagacgagcctattagtgcactggatatgtccatccgggcgcaggtgctcaacctgctgcgccagctgcaaaaacagcacggcatcacctacctgttcatcgcgcacgacctttcggtgatgcgctatatttccgaccgcattgccgtcatccgcaagggcaatatcgtggagcttgcggacgccgaggagctggtcacccacccgctgcacccctacacccgcagcctgctttctgccatccccatgccggacccgcgccgggagcgggagaagcagctgctggtgtacgaccccgccatgcacgattacaccgccgcgccgcccgcgtggcgccagctgcgcccgcagcactgggtgctgtgcaatgacgcagaagcggcgcagtggctcgctggaagcgggacgaactgacagaacaaaaccgggcagcccgcgggctgtccggtttttgcgtttgtttaacttactcttccgctctctaccgagaaactgacatccgccgcagccatggtggacttgcggtgggataccagcagcaccgtgcggtccttgcactcggcgcggacggcgcgcaggatgatgccctcgttcaggctgtcaagattggaggtaggctcgtccagcagcaggaaaggcgcatcgtgcaaaaatgcccgcgccacgccgatgcgctgccgctcgccgccggaaagggtgccgcccagctcgcccacaggggtgtcgtagcccttgggcaggctgcggataaagtcatccagcgcagcctttttgcaggcggcttccacctcttcctgcgcagcatcgcgctttgcgatgcggatgttgttgccgatggtatccgcaaacagctcggtctcctgcgtcacaaggctttcctgtgcgcgcagggcggcggtgttcacccgccggatgtcctctgcgccgaaccggatgctgccggtctgcacgtcccagaagcgcatcaacagccgcagcagggtgcttttgccgctgccggagcgtccggtgatgcccacgatctttttttccgggatggtcaggctgatctcccgcagcacctgctcccccgcgtagccaaagctgacgccgcgcacctcggcacccgcaaagggagtgttttcgccgtcggtcacctcgggggtcaccggtgcttcgtccaacagcgccagcacgcggtctgcgctggcaaatacctgcgtcagccctgcgccaaggttcgccagcgccaccaccggcccaaaggagctcagggcggtcagggtgcacaccagcaccccctgcgccgccagttcaccgcgctggtacagccacaggctcacgcccagcaccgccagtgtggtgaataagatcagggtgttggtcacggcaacaataagcccctcgcggtacttcagcgccgtctgctttgcgcccagcgtctcgctgtgggcggtgatgcccgccgcccgggcggcggtgtcctgatactgcagggtatcccgcaggccgcgcaggctttccagcacataactgttggtatcggccagcacctgccggtattcccgggcaacggcctgtccgcgctttgcgctccacaccggcagcgccgcgcccaccagcagataacccgccagcagcgccagcgcgggcaggatgtgccagtgcgcggtaaaggcggtcatgcccgccgcccagagcacggcgatgcacaccggcgagatggtgtgggcgtagaacacttccagcgcttcgatgtcggcggtgatcagggagatcaggtcgccccggtcgcggccttccagctttgcgggggtcaggcggcgcagtgcgccgaacaccttatcccggataagtgccagcagccggaaggcgatatagtggttagaggcctgctccgcatagcgcagcacgccgcgcagcagggcaaacatcagaatgcacccgaaggccgtgcccacggcgggcagcggactttgcagcccggcagcggtcaggatggcaaagccgccgaaaatggtgatgaaggtagcgcagaagtgccccgccacgcccataacgatggctgccgccatgatgggcagcatgggctttaccagcacgatcagccgcgccacaatggcggcaggcgtgcgatggttcgttgttttatgcatcaggcatcctcctttgcaagggtctccagctgcttctgggcagtgtacaggcggcagtaagcgccctgctgcgccagcagctgcgcgtgggtaccctgctcggcaatgccaccgttttccagcacatagatgcagtcgctgtccaccacgtttgccagccggtgggagattaaaatcaccgtctttttccctgccagaccccggatggccgccatgatgtcgttttcgctctcggcgtccacgttggaggtagcttcatcgaagaggtagatgggggtatcgtgcagcaaagcgcgcgccatggcaaggcgctgccgctgcccgccggaaaggttgctgccgccctcgtgcacggcggtctgcaagccgttctggctgcggcagaagtccgcaaggttcacctcttccagcgccgcccagagctcgctctccgccgcctgcggctttgccatgcgcaggttgttttccaccgtgcccttaaagatagtggaatcatggggcacaaccgtcagcgtgcgctgccgcgcagcctgctgcagctgctgcaccggcacgccgcccatggtcacctgcccggtatatccggtgcagcgccccgccagcagggcggcgatggtacttttgccgctgccggaagcgcccaccagcgagacaaagctgccctgcggcacggtaaaggatacatctttcagcacggtgcggccggtctcgtagccaaaggtcacatcttccagcgccagtgtggtatccgccggggcgttctgtgcgccgtcctgcggctcttctgccgccagcagacggaaaattttctctgctgaagctgcaccgttcatggcaatgtggaagtagctgcccagcagccgcagcggcaggaaaaagtctgccgccagcagcaaaatggtcaacgtggcggtcagctccagctgtcccgccgcaaaggccgccacggcgctgatgatacccagccctgcgccgccgtaggccatcaggtccatcagggtgaccgagttcagctgcatggtcagcacccgcatggtgattttgcggaagcgttcggcttcggcgttcatctgttcgtgcttccagccgtcggcctgataaattttcagggtggtcagtccctgaatattctccagaaagctgtcgcccagcgtggtgtactcgctccagtagcttgccagcagctttttggcgaatttctgcaccgccacgatggacatggggatcagcggcacgcagcacagcagaatgaccgctgaccgcgcgtgcacccccaccagcagcgcaaacagggtgacgggtgccaacaggctgtaaaacagctgcggcagatattttgcaaagtaggtgtcgatctgctccacgccctcgcttgccagcatgaccacctcactggtggccaccgtttcggtatagccggggccaaggcgggtgagcttttcgtaaattttgctgcgcagggtgcgcttgacgtcccgcgaggcctgatcgctcatgccggaagccagcatggtaaaggcaaaacgcagcggcactgtgccaaggcagagcaggatattctgccgcagtgcggcagcggtcaggctgcccgcaaaagccgcccccaccagccgtgcgaccgcccggacaaagatgatattacacaccagccccagccactggaacgccacgtttgctcccacataccgcagcgccgcccggtcgaaggacagcagttttttgtttatcatgggtgtttctcctcttccaccatccggtcatagtcggcggtaaaaaggcgctggggcagggcgctggtcatggcaagggcggcgctccacttttcctcgcctgtcagctccccgctcaccggcggaaagtgcgccagaatggcgtccagctcctgctgcacccgctttgccacccagatgccgcggtcggtcaggtaaattttaccgtagtactcctttacgatcatgccctgctccatgagcaggttcaaaatgcgcaccaccgagggctttgtcacccccagcttttccgcaatgctgcgggagctgatgtccagatgggtgcggcttacctcgtagatggccagcagatagcgcagatgcgctgcggtcagctgcataccggtcactctcctttttacgcgccggggtctgcccggtgttatcataagctaactttattttacttaaaaaaggagcgcgagccgagagtttcagcccgcgctccttgcggttcaatgcttagttcaatgctcagtggcagcccttgcagtggctgcaatcgccgccgcagctgcatccgccgccgtgcttgtgggtgtgccatacgacccagcccagcgcgccgaataccagcgctgccacgatgatggtgggcagattaaagtttgttgcaataaattccatcatacagcatacaccctttcgtttctatcagatgcgggaagtatccagctttacttcgttgttgtttgcgtacttgttggggcgcaccatcaggtagatgaacgctgccagcaccacaacagccaccacggtgaacaggccgaagtgcacctcgccggtgataaggccgcccagctgatacaccaccagcgcagagcagtaagccagagcacacatataaccaatggcgatggccgtccacttgccgttattcatctcgcgcttgatggcgcccatagcagcgaagcagggagcgcacagcaggttgaagatcatgaaggcgtaagccgacagagcggtgtagtcctgtgcaaccgctgcccagatctcgtcgccgttctcagacagctcgccgccgaagtgatacagaacaccgaaggtaccaaccacgttctcctttgcaatcaggccggagacggaagcgacggttgcacgccagttgccgaagcccagaggtgcaaagatccatgcgaccttggtagcgatagcagccagcacggagttgtcctgatcctcgaccataccgaaggcaccgttctcgaagccgaagccctgcataaaccacagcacaacggtagcgagcaaaatcacagagcctgcgcgcttgatgaaggaccagccgcgctcccaggttgcccgcagcacgttgccccatgcgggcacatggtaggcgggcagctccatcacgaagggagcgggatcacctgcgaagagcttggtctttttcagcatgatgccggagcagatgatggctgccatgccgatgaagtaggcagacactgccaccagcgaagaaccgccgaacagtgcaccggcgatcaggccgatgatgggcatctttgcgccgcaggggatgaagcaggtggtcatgatggtcatgcggcggtcacgctcgttctcgatggtacggcttgccataacgcccggcacgccgcagccggtgcccaccagcaccgggataaagctcttgccggaaaggccgaacttgcggaagatacggtccatgataaaggccacgcgggacatatagcccacgtcctccaggatagacagcaggaagaacagcaccagcatctggggcacaaagcccagcaccgcgcccacaccggccacgatgccgtccatgatcaggccgtacagccagcccgccacgccgatgctctccaaaaagccgcccagcgcgttcggcacgatctcgccaaacagcacatcgttggtccagtcggtggcaaaggtaccgatggcccagccgccgtccgcaatggaggtgcccatggacagggagtacatcaggtacatcaccactgcaaagatgggcagtgccagcacacggttggtaacgatccggtcgatcttatcggaaacggtcaggtgctccacgcgggccttcttcttgacagccttgcccaccacggtgttgatgtaggcgtagcgctggttggtgatgatgctctcagcgtcgtcgtccatctctttttcgcagtcctgaatgtgctcgtcgatgtgatccaccagtgccttgtcgagcttcagttctgccagcaccttgtcgtcgcgctcgaacagcttgacagcgtaccagcgcaggaaacggtcatccaccttgccctgaatgctctcctcaatgtgggcaatggcgtgctccacgctgccggtgaacacatggggcagctcgccggtcttggcggccttggcggcggctactgcagcctttgcggcggcctcggtgccctcgcccttcagggcgctgatctccaccgcctgacagcccagctctgcgctcagcttcttcaggtcgatcttatcgccgttcttgcgcaccaaatcgatcatgttcacagccatgaccaccgggatgcccagctcgatcagctgggtggtcaggtagaggttgcgctcgatgttggtgccgtcgatgatgttcaggatggcgtcgggcttctcctttacaaggtaagtacgggagacaacttcctccagcgtgtagggggacagcgagtagatgccgggcagatcctgaatgatcacgtccttatcgcccttgagtttgccttcctttttttccacagtaacgccgggccagttgcccacgtactggttggagccggtcaggttgttgaacagggtcgttttgccgcagttcgggttgccggccagtgcaattttaatgctcattgcggatacctttcctccctttggtcttatcagaccacttcgatcatctcagcgtcggccttgcgcacgctcagctcgtagttgcgcacggtcagctccatggggtcgcccagcggtgccaccttgcgcacatagatctgcacacccttggtgatgcccatatccatgatgcggcgcttcaccgggccttcgccgtgcagccgtgccacggtggcggtttcgcccacctttacgtctttcagtgttttcatcgtactcgttcctcccttgcagtatttcatgcagcaccgggaaggcgctgctcaggacaccatgatgcggcttgccatggtcttatccagtgccagacggctctgcttgacctgcacgatcaggttgcccgcgatctcgttgaccacggtcacctcgctgccaaccacgaaccccagctcggccagatgcagccgcacctcgtccttgccgctgattctgcggatggtgacggtctcgcctgcttttgtcatcgtcaaaggcatcatcgctgtgctccccttcccttgaaaaatatgtgatgctgcggtggttagtcagccgtaactatcagcgtagatagtttaccgctgctaaccaagcttgtcaatagatttttcatatctcatagttagtttatatgaacaaacaaattttatgccggtatcgctctgcatttttatcaaaatcatcaatgactaactctattttttgaaataaagttagctaatgtttacatttttagggagtgttttgcagttttatagggcagggtgacggagaagaaccccttccgtctgctcccgttggtcgcagccaccttccccaaggggacggcttcagcggcggcgggaaagtttgcggcagcgccaaaaggctcccccttgggggagctggcgcgttagcgcctgaagggggtaatccccgggagccaactcccccagtcgcctacggcgacagccccctctgggatggggcccttggcatggcgggaaagttccccgctaaagtgcaaagtacccggacacgccagaggctccctcccagagggagctgtcaaagccgtcaggctttgactgagggagttcagcccgcttgcgccaagcagtgccttctcccgcagcgccgcgctttcgcagaaagcggcgttgcaaatgccgtttcccttcacgacccctcccgtgaaaatgggatagcggagcgcccgcaggcgctccgctatcccgaaattataaataatctttccgctgaagatggctagagcgcagcggaagccattctaaatcctcccccaaacgcacgactgcccggcgcaaaggtcaaaactgcaccgggcggtcatgtgtaaaaaggaggatcgctctctcctgtgtcggaagcataggagagttgccaggataaaagagagtatttgaaaagagaatatcaatttttcaggcggcaactgccagctttaaaatgggcgtgccgctgtggaacagccgcagatacaccgctgtgcacttggccagctggtcaaagtgctgctgggcggcggcggggtcgccgtaggacttccagcatccgcagcaggtaaaacacttgccccggtgccggataaagcccacgacgtcctccagcggatagcccagaaataccccgatctcatgggggaaatccgccgcctctgccgcacagcacagacgcaggctgagctggtcgagcaaggcaccgcaatctgcggcatcttccggcagacggtagccctcccgggctaaaaagccgcgcacagcggcatctgccagcaccgtttgcagcttggcggcgcggtagacgtacaccagatactgccgggtagcgatgcacccccgcagcacccgcacctgcagacccttggggttcagctgggcgttccagcccgccacccgccgggcaaggtcggcacggtcgcgcgtttcgtagcggaacagccccgcaggcttcagccccgccagtaccggggcacattgttcgatcattacggtctcaaaatcacgctccatggcggttctcctttggcggcgatgtcagggtcagtgtgccccggatgccgggctgttatgagtaagacgcagctaaccagcacttcaaaaaagaagcagcacgcccgggctgcgggcactgccggtagggtcttatgcggttagttatttctaacgtcagtagtgtaccacagcaccaccggctgtgtcaagcctttatggcaaaaaagttatttatgacaaaccacacccgcgctacccttccggcggcaatcgtggtataatggggatattctcgggtctgccccttggggcgcaccctgccaaggaggttcacccccatgcccacacccatcaccgcgtccaccctgtctgcgctactgagcgccgcgctggcgcaaaagcccacccgcccgctggtgctggcgctggacggccgctgcggcagcggcaagaccacccttgccaacgggctggcggcgcagctgcccggctgcaccctgctgcgcacggatgatttctatctgccgcccgcgcagcgcatcccggactgggcgcacaccccctgcgccaacatggatcttacccgtctgcgggacgaagcgctgcgcctggcctacgcggggcagacggtggcctaccgggcgtacagctgccgggagggggcttatctgcccccggtgcagctgcccgcgcagccgctggtgattttagagggcagttacagccaccacccgctgctgcgcccctacgagacgctgcgggtattcgtgacctgcgcaaagcccgagcagacccggcgcttacaagcgcgggagggcacacgctacgcggattttgccgcccggtgggtgccgctggaggaggggtattttgcgcagtacggcatagccgaaaacgcggattttgtggtggagaccactcaaggcgggacgatttgaaatgcgctccgctccgcggggaaagcaagcgctgcacttgaaccaaaaactccccctgcaccgtgagatgcagggggagtttaactttacaggctgttacttattcttgtacatatcctgatagtagttctggtagtcgccgctggtgacatggttcatccactcctcgtggttcaggtaccagtcaatggtcagcacgatgcccttctcgaagggagtttcggggtaccagcccagatcgttcttgatcttggtggggtcgatgccatagcggcggtcgtgacccagacggtcggcgacgtgcttgatgagttcctcgctgatgccctcgtcctgcaggcggtcgtgcagctgggcgatgatggtcttgacgatgaagatgttggggcgctcgttgtggccgcccacgttgtacacctcgccgatcttgccgccgttggccaccatatcaatggccttgcagtgatcctccacatacagccagtcgcggatctgcataccatcaccgtagacaggcagctgcttgtggtgcttgacgttgttgatcatcagggggatcagcttctccgggaactggtaggggccgtagttgttggagcagcgggtgatgttcaccggcatcccataggtgtcgtggaaggccatgacgaacatatcggcgctggccttggaggaggagtaggggctgtgggggcacagcggagtggtctccataaagaagccgtccgcacccagagcgccgtacacctcatcggtggacacctgcaggtacttcttaccctctttccaagtcttggcatcggcgtcgtaccatgcctccttggcgcgctgcagcaggttgacagtgcccatcacattgctctgcacaaaaatttcggggttcttaatggagcggtccacatggctctcggcggcaaagttgatgacgtagtcgaaatcgtactttgcaaacaggctctccaccagctccttgtcgcagatgtcgccctgcacgaacacatggcgggggtcgccctccacgtccttcaggttttccagattgcctgcgtaggtcagcttatccagattgaccagcaggatctccgggtatttcttaagcatatagtgcacaaagttggaaccgataaaaccggcgcagccggtgatcagataggttttcataggtcagtattcccctttatttatttgttgttgtccccggactgcgggcgggctgcggcgcgggcgcgttcctcctcggcgcagcagtactttgccacaaggtagaggttcttgttcatgctgttcatggtcttgcccatggccttggcgtatgcttccagccctttgttcatgctgtgaatttcctcgtaggtggcttgggtgtaccgtgccagacccttgctcatgtcgctgagctccttgtgggtctctttggtgtactccaccagctccgcaaaggcatacagtgcccatgcaaggaacatctgcagcacccacagcaccacagcggccaccagccccaccacgatggctgaaaactggctgaagggcttcagtgcttcatggatcgaaccgcacagcatggccgcaagcacaaaggacagcacacactgcacctttgcaaagatctttaatatcttgacagatctgctaaaaatcgcatcaaacatgatacatcctcagttcttccgcagggggtgttgttttaaaagctgttttcgtaagcggtgcgcttatgaaaacggcttctttacttcatgccgttttcgccgtcccagttggcaaagaagcaggccagtgcgtccttccagtcgcggacatcgttgcccacagtgcagcgcagcatccggttgtccagtgcgctccacttggggcggtcggcgctgtccgggtgttttgccttgtactcctcgctggtgcagggggctacggtagcatctacgccggaaaggcggatgatctcggcagcaaaatcgtaccacgagcagatgccctcgccggtgcagtggtacaagccgtactcgtgggtcacgcacagctgcaggatctcgtgggcaaggtcgactgcgttggtggggttgccgcactggtcgttgaccacctccagcttaccgaactttttgccggcattcacgatggtcttgacaaagtttttgccgtagtagctgtacagccatgcggtgcgcacgatgaagtggcggtggcagaactgctccacatacttttcgcccatgagcttggtagagccgtaggcgctgatgggcccgggcagggtggcttcatcctgcgggatgccgccgttctcccggccggagaacacatagtcggtggaaacgtgcaccaaccgtgcgccggtcttttcggcagcctgcgccagattgcgagggccaagggcgtttgccttaaaggcatcgtcgtggtgcacttcgcacccgtccacgttggtgtaggcggcgcagttgatgatgatatccgggcggttgcgccgcacgaactcgtccaccatcttgtagttggagatatccagctccggcagatccaccgggatcaccgtagcgttgagcagcttttcggggataggacccagctcgctgcggccctcctgcagctgcttgagcagctccgtgcccagctgccctttgcagcctgtgacaatgattttcataccaatgtgcctttccttatgcttagtagcgcagcttgccttcggccacgttcttcaggtgctggccgtaggggctcttgccgtagcgctgggcgctttccagcagggtgtcgcggtcgatccagccgtacttgaaggcgatctcctccggtgcgctgatcttgatgccctgacgcttttcgatcatgtgcacaaagtcggcagcctccacaaggctttccatcgtgccggtatccagccatgcaaagccgcggcccagcagctgcacatccagctcatccttcttcaggtacatatcgttcagggtggtgatctccagctcgccacgggcagagggctttacctgctttgccatctccaccacttccttgttgtagaagtacagaccggtgatggcatagttggacttgggatgctggggcttttcctccacgctgagcaccttgccgtccttgtcgaactccacgatgccaaagcgctcgggatcctgcacatagtagccgaacacggtgcagcgacccttgttctctgcattggccgcagcgctcttgagcagcttggagaagccgttgccgtagaaaatgttatcgcccaggatcatggcgcagcagtcatcgccaatgaactcttcgcccagaataaaggcctgtgccagaccgtccggggagggctgcaccttatactgcagatggatgccgtactggctgccatcgcccagcagcgcctcaaagcggggcgtatcggtaggggtagagatgatcaggatatcctgaatgcccgccagcataagggtggacagcggatagtagatcatcggcttgtcgtagaccggcagcagctgtttgctggtgaccatggtcaaaggatagagccgtgtgccggcaccgccggcgagaataatgcctttcatacttgtgcactccttttttcttataaaaagatgtgcagcttaattcaaagcggagctgcgtccgctgtaaacaattttgggtctgccgcgtccgtatttttgcaaaagacgatagcagtacactttattttactatgaaagcacgcaaaatgcaagagggtgaaacgtcagaaagcggcgtgccgatggcacgccgctttctgcggatcaaaaacaatatttttcgtccccgctcaccacgcaaaaccccatttggaaaagtagcgcagcaggctgcgcagctgccacagaaaaggcttcaggctgcggtgcgccgcgcggtgccatgcgtggatggcggtgtactggggcaccagatatgccttgccctgcgtgcgcattttttgggtaagatcggcgtcctccacatacataaagtacccctcgtcaaagccgcccacggccttgaaagcggcagtgtccaccgccgaaaagctgccggtgcagaactcgatctcgataggctttgtcagatccttgtctgccatcaggtagcggtcgttgtactttgcccaaaagcgcagacagggcagctgacggtagaccatggcgcgcacattgcaccggcgcagcggcagctgctggggtctgccgtccgggaaggtcagccccgggcgggtcatcaccacgccggggtgcgccgccatccagtcggcaaggtcgctcagggtatctgcggtcagctggatatccgggttcaggataaagtgcacccggctgtgcagcagcgagagcaccgtgttgtgcccggtgccgaagccgccgttctccagccggcagagcacctgcacggtctgcccgggggcggtgcgcagagtgccgtcctttgcggcagcggtcagccgcttgccgctgccgtccgggctggcgttatccaccagatacagcgtaagcgggtagcggcgggtgcagtccagcacggtctgcgcggccttgatggcttcctgtgcgccgttatacaccacgatgcaggccgaaagctccatctgcgttccccctttcgtttcagtttgggtcaaaggctcactccagcggcttgatgtcaaagctgaagtcctccttcatcagatcaaagttggggttcatgcaggggtcgcccgcagccagctgctttgcccaccgcttctggaagcgctccacctcggagacaaagcgcttgcgcttgaccgggctctcgtccaagccgcggctcttgctctcgtagtggtacagctgcgcaaagggggtgaacacattggtgtagcctgcctcccgcacacggacgcagaagtccacgtcgttgaaggccacggcaaagctctcgtccagcccgtccacctgctcgtacacatccttgcgcaccatcaggcaggcggcggtcaccgcgtacacgtcctgcgcgtaggaaagccgtcccatatagccggggtgtcccacagggaagttcttgtgcatatgcgccgccagcgtccggaaaccaaagccgatgcctgcgtgctggatggtgttgtccgggtagagcagctttgcgcctacgcagcccacgcggtcctgctgggcgtacatgaccatctcttccatccagcggggagagatgacctcggtgtcgttgttgagcagcagcagatactcgccggtggcagcctttgcgccaaagttgttcagggcgctgtaattgaagccggtgccctgccatgtgagcagatgcagggtgtccgggtactccttttgcagctgctcgtagcagcggaaggtggcaggctccttgctgttgttctcaatgatgatcacttcaaaatccgggtaggtggtcttgcggtagatggactccacgcacacccgcaggtcgcccgaatggtcgcagctggggatcagtacgctgacccgcccgggctttgtgatggtgtaatcggtcttataaaagcccggggtgttgggcaccatggtcactgcgtccaccggcacgcccatgcggtcgtagtgggcgcgcagcgccttcatggctgcttccagacagtaggtcttggcggagatgttgctggccacgcttgcggggctggaacgccagtagtacagcagatgcgggatgtgcacgatcttctctgcctgctcggtcaggcgcaggtagaggtcgtaatcctgactgccgttgaactctgcccgctcgtcgccgcccacctttgccagcagcgccgcgctgaacacgctcaggtggcagatatagttgttggagcgcaggttatccagcatataatccggcttgaagtggtagaccgtcaggtggtcgatgttcccttcaaaggtcacttcgtcggtgtacacaaagtccgcgccctgcttggcaatggcttccgccacataccacagtgcacaggggtgcagaatgtcgtcatggtccagcagagcgatatattcacccgtggcaagggcaaagccctgattggtgttgcccgcaatgccctcgttgctgtccagtttccggtagcggatgcggctgtcggtgcgggcacgctcctgcacaaggacacccacgtccgcgtcctgtccggcatccaccatgcacagctcccagttgcggtaggtctggttctgcaccgagtccagcagctccaccagaaaatcgtggggggtgttgtacagcggcaccacgatgctgatgcacggtgcagcgggctggtctgcggcctgctttaccagcagttccacgtccgcaaagcggtcggcgggcatggccttgcccgggaacagctttttatactcctttttggccttggcctgtgccattacgcccgcaaagcccacccggcgcagggtggcaaaaaagacgaagagcgggaagctgcgccacagctggcggcacttgcttaccagataccgcagcggccagctggccctccagaaggtggagttgaccacactgttcagggtcttttccaagtcctgctcgtggctgcggctcagggaaaggtcgctgcgcagccgctccagctgggcagcctgttcggcggcggtgcgctcggcctgcacagtacgctcccgcaaaatgtccagctgctgttcatagcccgtctccagctccggcagctccggggcagccgtgcggcagaacagcgccgtcagctgctccttgccgctgtccttccatgcaaactcccggcaaaagccctgtgcggcaagctgctttgcgcagtctgccataccggtgtactcatcgcacaccagcaccaccttttcggcctgcacggcgggcagggtgacccactgagggtctgccaccaccagcagctccgggctgctttgcaccaccgtggtattcattttgtcaaaagcctcttccagcaggccgctgttctccagcacctgcacactgcggggtgccagttcccgcacgatgcgctgtgccagtgcacggcagcgctcggcggcctcctgattctgcttttcctgatccaactccatgctgatactccaatccgtgcgtttttctgcgcagttatgtttcccgttcatttttcacaaacggatatagtataccaaatcctacggcgtttgagaaggtttttccaaaatttcagtcaaatagccgctcagcggaacaaccccgcaagccagccgaacagcccgccgctgcgggtagtgcgggtacggatctgcgccccggtgtagtagtgccgtaagatctgcttgtagttcatgccttcctcggcggcgtagcccactgcgccgcactggctcatgcccacgccgtgaccatagccgtaataggtcatgcagggggtgccgccggcatcggtgccgaaatcgaagcagtagcgggaggaaacgaactggttgatgtaccggtagctgcgcccgttggacaccagtgtgttgtactgtacaaagccgcccagatccttgtgggtggtgtcggcgctctggtagggctcgccggtgcggctgtcgttgtattctatataggtgtagtccttgccgatcacccggcgcagcaggttgtggtactgctcctcgtaggggctttccacgctttggaggtaaggcacgtccgtgccccatgcgtccagactggcgcaggtgccgtacacgccggtctgggtgttgtagcccgcactggccgaccataccgcgtcgcacacgctgccgttgtacaccagcacctcatccctgaccgcctgcaccgccttgcggatggcgctgcgggtggaggatgggatctggctgaccggggtgtagatcagcgcattggcggacgagccgtactgcttgtggtattccagataagagtggatggccaccgcctgcgccttccacgcctgctgcgcagcgctggcgctgacatagctgccaatggagccaagctcggtgtaggtgatgcccaccagacaatccaccagatccagtgtgacattgcgcttgagcccctgccccttgatgttcaggtagggcatggtgattttatccttggagccaaacagccagctgagacagttttcgttctctgcggggatcagggtggtatcggccccgccgatggtggtggcagccgaagccgctgccgccgggatgcagacgcacagcaccgccgccagcagaaaagccgccgcgcggcgggcaaaagaatgcagatgtttcaaagtccggttccctccttgtgggcatattcttgcagtttgatatgaccttagtgtaacacagccagcgccgccgggcaagaaccggagttatgtattttacagtaccgttttggggaagcgctgccgcacccgcaaaaaagccgccgcacggtcaggtgcagcggcttttttcttcacgtaccttctatggaaaaacgctttttacagggcagccacggcagccttcagggcatccacgcggtcggtgttctcccacttcacgcccagatcctcgcggcccatgtggccgtaggcggccagctggcggtagatgggcttgcgcagatccagctcgcggatgatggcggcgggggtcaggtcaaacaccttctccacagcctgctcgatcttctcgtctgccacagtgccagtgccgaaggtatccaccatgatggacacgggctttgccacgccgatggcgtaggccacctgcacctcgcactgctttgccagacccgcagccacgatgttctttgccacccagcgggtagcgtaggctgcgctgcggtccaccttgctggggtccttgccggagaaagcgccgccaccgtggcgtgcatagccgccgtaggtgtccacgatgatcttacggccggtcaggccggtatcgccctgcgggccgcccacaacaaagcggccggtggggttgatgtagtacttggtgttctcgtccagcagctcggcggggatggtggccttgatgaccttttccatcacgtctgcgcgcagctgctccatgctcacgctctcgctgtgctggctggagatgaccacggcatccacgcgcacgggcttgttgttctcgtcgtactccacggtcacctggcttttgccgtccgggcgcaggtagtccatctcgccgctcttgcgcacctcagtcaggcgctttgccagcttgtgggcaaggctgatgggcatgggcatcagctcgggggtctcgtcgcaggcataaccgaacatcatgccctgatcgcctgcaccgcccacctgatcgttggtgcccagtgcaatatcggggctctggccgtcaatgttggagatgacggcgcaggtgtcggcgtcaaagccgaactttgcgcgggtgtagccgatatctgccaccacctcgcggacgaccttctggaagtccacatagcagctggtggtgatctcgcccatgatgtgcacaaggccggtggatgcgcaggtctcgcaggccacgcgggcatcagggtcgtgggtcaggatctcgtccagaattgcatcagagatctggtcgcagattttgtcgggatgtccctcggtaacggactccgaagtaaacaggtgtctagccattttttgcctcctaaatgttgcagttgcgtgtatttaccattccatcaagtttgttctgaaaaataaaagcgctcagagccgaaagctctgagcgttgcactcttatcttccggtttcccgcaggatttggcaccttacgctctcgcgcaggttgtcgggcttcacagggcctgtcccctcagccgctcttgataagtcggtattcaattggtacgctccatattctatcattgcagcgtcagattgtcaagataagtctcacttattttagacattccttttaaattgatggagcatttccctgctccggtgcggcatggccgtcccgggcggcatggaaagcgcgcttttccgcatacatccgctgatccagctccaccagaaacttctccacgctgccgccctcgtactttgccacaccggtggagaaggacagctgaaagctgcccgccggagcggtttcgttatagtgctgcacccgccgctcgattgcggcacaggtcttgtccagtatctcctccgagccatgccggatcagcaccatgaactcatcgccgctcatgcggatggctaccgagtttgccgccagtgccccggacaggatgtgcccgatctcctgaatggcccggtcgccctcggcgtgaccgtaggtgtcgttgatctccttgaagcagttcacgtccatcatgatgccgtaaacgtccttctcctgcgtgtcgtggatgcggtccagacagtagttcatgtacttgcgcccaaacaggccggacagctcgtcggtatagccgcgcaggctgcgggtctgactgtccacaagcacaaaagcgatggctactgacagccagccaaaggccatgccgtagaatgcgccctgcagcagcgtgcccaccgcacaggtgaccacgaagtagtacaccgggaaaaactccaccgtaacgccatcgcgcttggccttatgcacctgccacacgctctctgcgtaatagctgaacagcagcagatacagcaaaatattcagcggaccccgatggtaagcgttgtccgccgagatggtaaagatccaccccgtgccaaaaaggtttgccaccagcagcaccaaaagcgccagcagcggcgcgcccagcagaaagtgtcttctgcgcaggcgtccaatgctgcggtagacccggaagtccacatacaagcaccacgcatagcccacgctcacggtagcgccggtgcagacggtgttggtcaggtacagccagaaccggcttaccgcgccgggcacgccgtccaacagaaagctgatcgtctctgttgcctgtgccagcagcgtcaccaccagaatccggcaaaacagctctgttcccacgctgtttttgctctcgccgcgcacccgcagcaaaagcagaaagcttaccagcaccgcccctgtgccattggccacaaggatctcgggtatattcattgcatttcctcctctgcccgccttaccccataaagcgggcagcctcctattttatacagtatctattttattatacaccctgctgcaccctgcttgcaaggcttggacgcaaaaaggccgctgcacggcaatttgtgcagcagcccttgagaaatcatcctttgcagttcagccaagcccagagctttgccgaaatacattttttgcagaaaacttaatagccctttgcctgctcgccgttcaaaatcttgacagcgcgggaggtccccagacggtcagcgcccagtgcaaggaaggtctccatatcctccacggtggaaatgccgccggcagccttgaccttgcagcggccatgcacgcccttgaccatcagctccacatcatggaagttggcacctgcggtggaaaagccggtgctggtcttgatgtagtcggcaccagcctcgcagacgatgtcgcacatcttttccttctcttcctcggtcagcagacaggtctcaatgatgaccttcaaaatcttatcgcccacagcctgcttcacggcacggatgtcctcgcggacagcatcgtactccttgttcttcaggcggccgatgttgatgaccatatccacctcggctgcgccgttggcgatggcagtcttggcttcaaaggccttgctggcggtatccatagcacccagagggaagcctaccacgcagcacacggggatgcggcctgccatatactccacagcctgcttgacgtagcaggtgttgatgcagacagatgcggtgtggtttgcaatggcttcgtcacacagctgctggatctggggccaggtagcctccggcttcagcagggtatgatcgacatgggacaggatctcttcgcggttcattctcgttcctccgttgttttacttgctggcacggcgcacctttgccatgcccacagcgctcagtgcgatcgcagtcaccgatgccgttgcaccaatgatgcccagcaccagaccggaaaccaggaatgcgaaccctttcagaccacgtttcataataccgtacctcctgaaaattattgtttctttttaaagataatgagcttgctgaacacatagttcagcaagatcaccagtacattggaaaagaccttcacggcaaggccccacattgcctgagcatcgtaggcgctggtgacgaagatggctgtggggccgtccgccccgccgatgacggcaatggcagcggagccatctgccacggcggcatggctcccggcaaagctgtttgccatgtagagggtagtatccggacccagccagcccgccacggcgcccagcagaccctgcatggcggtgtccaccagcgccgcgccctgcgccgccagcaggttgccgcccacgatcatgataacggcatccagcaccatagtgcccagacggcaggtgacaaaggtgccgaactccttggccatggctttgccggtggtcttgctgcggaacacgaacgcgcggttggtgcagtaggcaaacaggatgcataaggcgttatccagcacattgccccagctgttggcggcagtatagccgaacaaccggctgaacagcgcgtacaacacaatgttcagcagggtcgtcagcacgccaaagatcaggtaactgagcacttcccagtgcttttttaaaaatttcatcatggctttgttaacaaaaacagccccgccgccgttttcccggcaacggggctgcagatcgcattgtgtcagaagctatgcttttgcacgaagggctgattactcagcgtcgtcgttcagcagagccttcatggacaggctgatgcgcttcttgtcgaagtcaacatccagcagcttcacatcgaccatatcgccgaccttcagtgcgtcggagaccttctcaacgcggtcattgctgatctcgctgatgtggaccagaccgtcaacacccggcaggatgcggacgaatgcaccaaacttggtcagagaaacgaccggagcgtggaaggtgctgccgatggggtagttgttcttcagctgctcccaggggttgtcctcggacttcttgtagcccagagaaaccttgtggttctcggtgtcgatgtccttgacatacacttcgatggtgtcaccaacggagacgacctcggaggggtgcttgatgcggttccagctcagctcgctgatgtggcacaggccgtcgacaccaccgatgtcaacgaatgcaccataagaggtcaggctcttgacaacgccggtgtaggtcttgcccacctcaacgtttgcccagaactcctcgcgctttgccttgttctgctcagcggtcaccttgttgatgctgcccacgatcttgcggccagagcactcggtgacgaccagctgaacgtgctggccgaccagagcagtgtagtcctcgtcgcggcgcatagtggcctgagaacggggaacgaacaccttgacgcccttgacgttgacgacaacgccgcccttattgaactcggtaacatcgccctcgacgacttcaccggattctgctgccttggcgatctcttccatgcccttgcgagatgcgagcttcttgcgggagagctggatgacgccatcctgatccataaccttctcgacgatgaggtccagctcatcgccaaccttcaccaggtcttcgaccttggcggaggaatcatcggtcagctcgctcagcttgacaaagccggtctgcttcgcaccgatatccacctggatctcgttggcagagatgctggtcacgattcctttcacaatactgcctgcatgaacccgcttttcttcggatgcgttcagcatctcctcaaagctcatgctgtcattgatttctgcgctcatactgttaagtacctcctcaataatagacgatggcgttgaagccccggctgtcacgcccgccactttaacatctgcaaaccattccggccgaagttcgctcgctgtctcgaccgttacggcacgcgtgtgttttgcggcgacctgtaccagcttttgggtattggaagaatgatgaccgccaatgacaacaacaatgtcgcatttttggctgaggtcttccgcttcctgttgcctcgcccacgtcgcattacatattgtatcaaaaattcgggcgtttgtataggcttttttgagaaactccgaactttctttccattttgttacctgaaatgtggtctgtgcaactgcaaaaaggggtttttgggggtcagaagggccgttccacgcctccaattcggctaaatcggcaaaaacgaacacctcgccccgggtgtgtcccacgatgccctgcacctccgggtgggtcttatcacccgccaccagcagcaccgcgccctctttttcggcctgtgcggcaatgcgctggatcttctgcacaaagggacaggtggcgtcgtggtaagggatgccgcgcgactccagctcgtcgtagatgctgcggggcaccccgtggctgcggatgaccacctcgcacccggcaggcacatcctgcacggtgtttaccacctgtgcacccttgcgccgcatatcctccaccgcctgtgggttgtggatcagcgggcccagcgttgctaccctgtgcccctcgtccagcagcttataggtcagttccacggcacggttcacgccgaagcagaaccccgccgttttagccaaacggatctccattttttacgctcccatcttttcccatgcttccagcaatgcctgcttgttggcacggagttttttggtatcccggcggctttccatggcaaactgtgctgcgggcatcggctcgccgtagatcacccgcaccctgcagaacaggtgcatttttccgtccggggtgtcgtagaagatgcggcagggcacaacgtccaccccggcttcggcggcaatgacaaaaagaccgctcttggggggcagcagtttgccctccttttcgcgggtaccctccgggaagatgagcagggtcttgccctgcttgcaggcttccaccgtctgggagatgaccgccatctcgtccttggtgccgcggacgcacacaccgccgcagcagcggaagaaccatgtcagaaaggcgttgatctcgaacagttcctttttggcgaacaccaccatccgcctgccccagcgggtgacaacgatgaacaccgggtcgatagcagatacatgggtgggcgcaaggatatagcccttcgtctgcacttttttcaggttttcgcgcccctccacccgaatgcggaagccgatgtgccacacaagccacgcaagaggcaccagaatataatatagtaccattttctattcctgtcctgtttgttttatcagccaatcttttacagattgaccctgagcaaaagccttcaccccttggggggaaggtggcgcacagcgccggatgaggggtaatttccccgtaagctgctgctcgcctacgccctcatcagtcacctgcggtgacagcttcccccggccgggggaagccttcattcggaaacctgatttctatgggcaatgatctgcttcatggcgtcaaggctctgctcaaaatccagttccgaggtatccagcagcacggcgtcctctgcctgcttcagcggggcggcggcgcggtgggtgtcctgatagtcccgctgcttcacgtctgccagcacttcctcgtagggagtgtcgatgcccttggcctgatactccttccagcggcgggtggcgcgtgcctccgggctggcagtcaggaagatcttcaccgtagcgtccggcagcaccaccgtgccgatgtcccggccatccatcagcacatcctgctttttggccatgctgcgctgcaagtccagcagaaatgcccgcacggcggggtttgcacctacggcagaggctgccatacccgcctgctcggtgcggatggcggtgctcacgtcctcgtccttcaagtagatgtgctgctcgcccgcaatggaggccagtcgcagctcgatttccggcagcagggcatccaccgccgcgttgtccttggggtccttgcccgcgcgcagggcgtacaggccgatggcgcggtacattgcaccggtgtccacatagatatagcccagctctgccgccagacggcgtgccagagtggatttgcctgcacccgcaggcccatcaattgcaacagataccataatatgttctccttatttatatatagtacacagcagaatggatggtgctgttttttacagattattggcaaagctttgtgcggtgcagaaggcgatctgcagattgtagccgccggtgtaggcgtccacgtccagcacctcgcccgcaaagtacagccccagcgcctttttgctctgcatggtcttggggtccacctcccgcaccgatacgccgccgctggtgatgactgcgtgggcaaggtcgccccgggcgtcaatggacacctgccagtgcttgaccagctgcaccagttcccgcttctgctcccgggtgatctggtttgccttggtggcggggtcgatgccccagcgcgccaccatcaccggctgcatactggagggcagcagcttgaccagcgccccctgcgccgcgtggtttgccagcagggcaaagtcccgggtgatgcggtcgtacagctgctcctcgctcagggcgggcttcatgtcgatctccgcgatgtacctgtgctttttcatatcccccagatggctggacgcgctcaaggtcagcggcccgctgatgccaaagtgggtaaacagcatctcgccctgctcgtcaaagatggccttgccgtcctccagcagggtcagggtgacgtttttcagtgccagacccatcatctttttgcagtccgggtcccggctgacaaggctgaccagacttggcaccggctccacaagggtgtgccccgcctgctgtgccagcttgtagccatcgccggtagagccggtggtggggtagctcacgccgccggtggccaccagcaccgcgtccgcccggtactccctgccggaagtgccccgcacgcccacgcagcgcagcgccgggccagcctttttctttttggggtggcgcgggttttccggtgccgccggggcaggctctgcctccggcacgacctcctccagcagcagcttttttgcgccgtcgtagacgatgtcggcgtcctgcgcatagcgcagcagcgcctgccggatctcctcggccttatccgataccgggaacacccggcggccgcgctccaccttcagctccacgcccaaagcttcgaacagctccatggtctttgccggggggaacgcccccagcgaggagtacaaaaagcgcgggttcgtgcgcacatggcgcaaaaactcctctgccgggcagtcgttggtcacgttgcagcgccccttgccggtgacaaggatcttctgcccgggcttatcggtatgctccagcaccgtcacctgatgtccctgccgcacggcggcacccgccgccatcagtccggctgccccggctcccacgatcaaaacccttgccatctgtcatcctcccaaaatcgcctgttaattctattgtatcataccagaaaccccgcacaaaagcaatgcagcgccgcaggaaatgaatggattttcagttccatgccctcttgacaaagccgccgggctgctgtattctttttacagaccgttagtttgtaaaaaaggagcatctgccatgccgcgcaacaaatacccggaacagaccgtggaaaagatcttagacgccgctgccctgctcttcacccagaagggctaccagaataccaccctgcaggacatcattgatgccacaaagctttccaaaggggcggtgtaccatcacttccgctccaaggaggagatcgcgcagcgcgtcggtgaccgtttgggcgaccagatgtgggagccgctgcgccatatccgggacgacccgtccctgaccgggctgcaaaagctgcaggcggtgtttgcagcatcctttgccgggcagcggcagcagcagatcgcgcagaccttgccgcacctgtgcagcaacccgcagttccttgccatggaactagacaacattgaagcgcatctggccccggaatgtattgcacccatgatccggcagggcatggcggacggctccatccacaccgccgatgccaatgcgctggcggaagcgctgttcgtgctggcagacatctggctttccccccagacgcgccccaccacgccggctcagcagcgggcgcggaatctcgtgtttcagcaaatgacccatgcgcttgggctggatcttttgacggatgcacaggctgcacagctggtgcagctgtgcacaccggtcaaagactgaattttccgggcggaacgctccgcccttttttatacgcagatacagaccaacggtttgtaagcaaaaaacaggaggttcccatgaacacttttttcctcatcgtcctcgggcagatcatctccctgttcggcaatgccgccctgcggtttgcgctgccgctgtatctgctgcggcagactggttctgctgcgctgtacggcggcatcaccgcgctggccatgctgcctgctctggccggaatgctgaccggcggcgcgctggcagaccgctgccgtaaagcccgcctgatggcgctgctggatctggtaaccgccggtatttcggcggcagccgctgccgggttgccgcatctgcccctgcttccgctgatcctgaccgtgctgggcagtctgtacgccattcaggggctttaccagcctgtagtacgcgcctgtctgcccctgctgctgaacggcacccagctgctgcgcggcaacgcagtcatccaactggtggataccgtggacgagcttctcggccccttgctgggtgctgttctgctggagcacctcggcatccgtggtctgctggcgctctgcggcggctgctttgcactttccgccgggatggagctctgcctgcgcatcccacaggatgtcccccgggacacaaagctctccgtccgttctctgtggaccgacctgcgggaaagtgcgcggtttctcaccgggcaggctgcggtgctgcggctagctgccgccatggcggctgtaaacctgctggaagtccctgccctcaccgtgggggttccggtgctggtggtgcagactttgcagaaaagtgatgcctcccttggtcttgtgcaggcggtgctgagcgcgggcggcattttaggcggcgtgctggcgggaaccttctttgtccggcatcccatccgcagcggcacaggtcttttgctggcgctcagcggcgtgtgcgccgcgctgggtcttgccctccgggtgcccacactccagttcggcagcattctggtgctgggtgccgtgtttatggccgtggcggcactgttcaatgtgtggttctttgcgcagctgcaaatgctagtaccgcaggcacagctgggcaagacgaccgcctgcatctccgtgctggcctgcctgacccagcccatcgggcaggcagcctatggcagtgccttccagcactgggctgcgcacccggcagatgtactgctggcagccggggtgctttcggcgctggttctctggctgctgcaaacgcgccgtaccgcctgacgcagcaaaaaaggagccgctgttgcagccccttttatggtatgcttactccggcagctttgccgggtcgaggtagctttcaccctgctttacctccacatggatgtggctttcctcagcacactcgcagccgaccgtacccaccgtgccaagcttctgcccggcggtcacggtgtcgcccgcctttacggcggggtcagccacaccgcacagccgccaaaggcggccagcggcatcctccagcaccaccacggtgccccagttgccctctgccccggcagagactaccttgcccgccacaggcgccgctaccgcagcgccctgcgtgcaggcatagtccacaccgttgtgggtgcgccagtccccaagggtcttgttatacaccagctcatcgccgctgaaggcgttgagcacgcgccccggcatagagggcgcggcggcaggctgtgccgaactgctggcaggcgaggatgcgccttgcagtgccgagggttcgcgcagcgaaccagagccagactgcgcaccagaggacgccccagagggcgtctgctgcggcacatctgccttgctgtttgcaacgtcggtcacgggctgctgccatgtggtgtcctcctgtgcgtcccagtccggttctgtttccggggtggtctgttgggtggtgccgggggcgttcagcccatccagacttttttgcagttctgcccgcagggcgcgcaccgcccacacccccgccgcagccgcagccagcaggcttgcggccagcagcagagcaaagcccttgccgtgcagaaattttttgatctgctccatgcttgttactcccatctgtccgttttgtgtacggggtctttttctgggtttagtgtgggacagcggcgggcagtttatacaaagggataaaaaagacagcgaaaaataaatcagccaagccctgcaggcttggctgatttacagatcataaagttctttctgcgcttagtcgcggcggcggctgttcagacccagcagacgcaccacatacaagaagatgttgatgaagtccagatacagcgtcagtgcaccgtagatggaagccttttccgccagctcgctgtcccctgcgtagtaggagtacatctggctcagcttctgggtgtcgtaggcggtcagcagcatgaacaccaccagaccgatgccggaatacagcaccgtgctcataaagcccatgccgaacagcacaccgacgaaaccggtgataagcagcgcaaacagcgccatcatcagcttgggaccccagccggacagatccttgtgggtggtggtgccgtaaactgccatcaggccgaaatacagcgatgtggcaaggaaggccagcaccagcgtgcccagatcaaaggcaaggaaataatagctcagcaccatgccgttgagcagggcgtagcctaaaaatactcctcttgccgcgcccacggacatattctgcacccgggcgctcagcacgaacaccagcgccagctcggcaatggtgaacagcaggtacagcgagttgaccacatagaacagcggggtggtggcggtgacaaacgccgccgcaaaggtgatcagcagtcccagcgccatccagcggtaggtgcgggtcatataatcagccgaggtcattgtaggctctgcatagccacggttgtaattgttgtaactcatctgggttcctccagtctattctgccggagcatttctctcttgctccggtctacggaatatagtatactgcatagaaatgaacgtttcatgaaaaaggctgtgatattgtatgtcccttggactttatctgcatattccctactgcttttccaaatgccggtactgcgatttttattcccaccccggggagcggggcgtgccggatgcttatgtggacgcgcttctgcgggagctgcaccgctttgcgccaaacgcgcccctgcggccggataccgtttatttcggcggcggcacgcccagcctgctcaccccggcgcaggcagagcggctcatccgggcagcagagcccgtgtccggtgcagagatcaccttggaagcaaaccccgagaccgtcaccgaggagagcctgcggggcttccgggcggcgggggtgaaccgcatctccttcggggtgcagtctgcccgggacacccagctgcgcacccttggccgtccccacagcgccaagcaggcgcgggcagcctttgccgccgcccggcgcgccgggttcgagaacatcagcggcgatatcatgctggcgctgccccattatacgcaggccgagtttgacgagacactggaactgatcgaaaaaggcggggcgacccacatctcggcctaccttttaaagatagagccggactctgccttcggcaagcacccgccggaggggctgcccaccggcgatgaagccgccgatttctatctttacgccgtggagcagctggaacaccacggctaccgccagtacgagatctccaactttgcaaagccgggctatgagggcaggcacaacctcatctactgggactgcggcgactatcttggccttggccctgcggcgcactcctgcatgggcggcaagcggttctgctacgcaccggacaccgccgcctttctgcaggacgccgccgcgcccatcatggacggcaattgcggcgcagaggactacctgatcttacagctgcggctgcgcaaggggcttgaccttgcagcctacaaagccatatacggcaagcagttttccaccgcacagctggcctttgtgcaaaactgcgtccgtgccgggtacgccaccttcgatggcagtaccctcgctctgacccccgccgggcttattgttcagaacagcatccttgcccagctgctgtaagccctctcaggctttggctcttgtccccagcttttccagttccaccaccggccagccgagggcgcggatagcgctttcatcgtgggtggccagcagcaccggcttgcccgcgcagcgctgccgcagcagcgccgccgcccgctgcaaggtgtccgggtccatgccggtaaagggctcgtccaatagcagggtgtcgctgggtgcccacagcgcccgcagcagcgccacccgccgcttttgcccgccggaaagcctgcgggcaggcagctgcaaggctgcaatgtccattccaagttgttgaaaaccgcttataatttgctctttgtactggttttctgtccccggaagcaccaaggtgacgttctgcacggcgttcagctggggacaaaggcggtcttcctgaaagaccgctgccacccggcccacgccctccacgctgccggcggtggggcgttccagccccatcaggatgcgcagcagggtggtcttgccccagccgctgggtgcccacagcaccacgggagcatccacctccatgcacaggtcggtgaagagcggcgctgcgccgaactgttttgtcagatgttgaagcttcagcattttgtcccctcctctcccagcactgtgcccacggctttatccagtgcaagcaggaacagcttttcaaagcctgcgctcagcaggatgatgacaaaggtccacgcaaacagttccccggtggaaagggtgatcttagcgcggtagagcgcatcgccgatgctgccgttgggcaggccgatgacctcggctgccacaccgcttttccagcagatgcccagcgccacgctgcacccctgccggaaggccggaagcaccgcaggcagccagatcgaccgcaggcggcgccccggcggcagacggaacaccgctgccatctccagcagctgcacgtctgcaccggcaatgccggtgcgcaccgcgccgtacagcaccggcagcaccatcaaaaagctgataagcaccgaaagcgcactgccccgcacccagaccagcgccaaaatgataaagcttgccaccggcgtggccttgaccagctgcatcaccggagccagcagcgcatcggcggcgctccaccgggcggcgcacaccgccagcaccacgctgaccactgcgcccagcacaaaacccagcaaaatgcgccctgagctgaagcccacccgctgccagaaatctgcccttggcagcaattgcaccaaagtgcgcagcgcctgcaccggcgataccaaaaacacctcctgcccgatggccatggctgcggcctgccagaccgccagccagaacgccaccgccagcagacggcggaaaaactgcttgttctgcttcataaactgccctcttccgcttcctattataaggtatagtataccataccgtcccgcaaaggggaatgacctgtgcaccccccacggcgggtcggctcgctctgtatatacttttattcaaccgtcgtatgcttgacatgaatttacatccagtgtaaactgggtacagtacacggtgcacctttgcgccggcgcaggaaagagaggacagtattgacaaaagcgctcaagggccgcaagctgctgcttgtcggttttacgttattttccatgtttttcggggcgggcaacctgatcttcccacccgatctgggtgcaaaggcgggggtaaacttctggcccgcctttctggggcttgccctcagtgccgtgggtctgccggttgcagggatcatcgcggtggcacgggcagacggtctggacaagttggccgggcgggtgcacccggtattcgcacaggtgttcatgattttgatctacctgtccatcgggccgtgtctggccattccgcgcaccgcaagcacctcgtttgccatgctcaccccgctgctgggcagcagcgccgggctgcagctggggtactccgtgctgttcttcggcgcggcctttctggtagcgctgcgcccagacaggctcacccgctggctgggcaggctgctctgcccctgcctgctggttctgattttgatcctgttcggcggctgtttgctacacccgctggcggcgcagtacggtgcgcccaccgatgcgtatagttcagcggtcattttacaaggcgtattgtacggttaccagaccatggacgcccttgccgcactgaactttggcgcggtcatcgccatgaacatccgggcgcagggcgttgcccgggagcaggacgtgcagcgcagtgccatccgttccggtcttgtggcaggcgggctgttgctggcggtctatgccatgctggggcacgccggagcgttgaccggtgccgccgtgcccggtcttgccaccggtgccgaggtgctgaccgtgctggcggagcggctgttcggtaaagcggggctggtgctgcttgcggccatctttatgctggcctgcttcaacacctgtgtggggctgatcgcctgtgtgggagagtatttccataccctgctgccccgcatcccctaccctgctcttgccgccttttttgccgctgccagtatgctgatcgcaaatctggggctggcagagatcctgcgtttgtccgtcccggtgctcaacgcgctgtacccggtagccattgtgctgatcgcgctttccttcgcgcccgggctggaacagcgccaccgggtctacccgctgtgcattggctgcaccgccgtgcagagcattgccgccgcgctgccgcttggcgcactttctgcccttgccaacgccctgccactggcggcactgggctttggctgggtgctcccggctgccgccgggctgctggcaggcattcttttaagcagaactgaaaaataataggagattttactatgatccagcccatcatgcacgacccgctgtttctggcgcagaagtccgcccccgccaccccggaggatgcccctgttgcgcgggacttactggacaccctgaccgcccacgccgacggctgtgtgggcatggctgccaacatgatcggcgtgcgcaagcgcatcatcgcggtggaagctgaggacgggtatttagtgctgttcaacccggtcatcctgaaaaagtccggccagtacgaagccgaagagggctgtctttcgctggaaggtgtgcggaaaacaaagcgctggcagagtatcaaggtgcagtaccagaccttggacggcaagctgcgcatcaagacctttaccggctggacagcgcagatcatccagcacgagatcgaccattgcgatgggatcttgatctgaatccccttctcacgggtggggcgtgaagagcagcagcatttgcagcaccgctttctgtgaaagcgcggcgctgcggggataccccttccgtcatcgcctgcggcgatgccaccttccccaaggggacggcttttggcagtggcgggaaagttttcggcatagcgcaaaggcgtccccttgggggagctggcgaacgtagtgagcctgagggggtggcctttggcatggcgggaaagtttccggctacgtccctcccgtgaaaaagcaactctggaaaatccgcagattttccagagttgcaaacatcaaaatattctttccgctatttatgcgcaaagcgaacgcggagcgcattccaaatcgttttttcttcaacttacgcacaaagcccccgagggtgtgtcccccgggggctttgctatgctgtaacagagaaatgaaggtgttattgttcgcttaaaacctcttgcggtgccctgcatccgcttcgacccttgggcgggtctcgcgtcttgcagaccgctgcgccaaaaattgctccctgtactcccctttttgtcacttgcgtgacatcttcccccggagcgggggaagtctttgctcgcaggcggcggtcgcaattttagcctttaacgccgccaagagcaacgccgcggacgatgaacttggacagcagcaggtagacgatgatgaccggcagaatggcgatggccaccatcatgtacaccttgcccatatcgaacttcaggaagtccgcgctgcgcagctgagcgatcaggataggcagggtctttttgtcggcagtgtccaacaccagagccgggatgaagtagttgttccagctggccacgaaggagaaaatggcctgtacagccagagccggcttcatgatgggcagcacgattttattaaaggtatagaactcgcctgcgccgtcaatgcgggcggcttccacgatctccatgggaagggaggcgtccagatactgcttcatgaagaagaacacagtgggtgccgcaatgctgggaacgatcagcgggatgaagctgtttttcaagcccatcttggagatcaactgcagaaagcccagtgcggacacctgtgtgggcatggtcatgatgagcaggatcagggcaaaggcagcctttttgaacttgaagttataggcgtagatgccgtaggccgtcagtgccgagaagtaaacgctgagcgctgccgagcaggcagacaccagcaggctgttgcggatgccgcttaccacagggatgttggcgtccgtaagcacgttgcggaagtttgtgatgatggacttgcccggcatcagcgagaagcccttctggatctcgaagtgggtgcgggtggagttgatgatcagcacatagaagaagaacaggcacagaaagctgatcagcaccagcaccagatagcaccacgcacggcgggcggtcaagatcgccttttcggactggtttttaggcgtatgtgccatacttatttccctcctttggcagcagcctttttggctgccttcagttccttgcgctgagccttggtcaggccgtcatcttccttggtcagcgagaagtacacgacgacgcacagcactgcacacacaaggaacagcaccacagatactgcaccggccatgccgtagttcttgctgaacaggtggttgttcaggtacataatcatggtggtggaggtacggtcggggccgcccttgccgttggtcaggatctgcggcacatcgaacatctgcaggccgccgatcatggaggtgatcatcacatagaccagaatgggacggatcaggggcagggtgatcttccagaacatctggttcggggtgcagccgtccagctctgcagcctcgtacagggtgggatccacgcccataatggcggccatcagcatgatggtggtgttgccgaaccacatcaggaagttcatcaggcccaccagaccacggttgccccacacggtattcaaaaagctgatgggggtcttgatccagcccatgctcagcagcactgcgttcaccgggccgttatccgagaacagggcgaagaacagcattgcgaaggccgaggccatgatcaggttgggcatatagatgaccgtcttgaagaaggtctgtcccttcagcttcagccgcaggtcggtgaaccatgccgccagcagcagcgagacgacgatctgcgggataaaaccgatgatccacaggatcagcgtgttgctgaaatacttgggtagatcggtcgcgaacagggtgatgtagtttttcagacccacaaagttgggtccgatgatcttcagaccgctgcggtaatactcaaaaaagctgtaatagatggtggatgccagagggatcagctggaataccgcgaagatgataaagaacggtgcaatgaagatatagccccatttcgcgtagctgatcgaccctttcttctttgttttttctcccatgagatctccctcctgccgggtcacagcaaaaccaaaggggcgggcgagatacgccgcccgcccctttgcttcaattttcagttcggagtaaaaccgcttatgcgggccataccacgtcggtcagctcggggtacttctccttgatggcggtctcgaagtttgccttggcggcatcctcctccacgttgccggtgaagtaatccttgaaagcgttctggaagctctcgttcaggccctgatcgtacgggccggcgttggacatatcgatcttggttgcagcctctgcaaacagagcgatatggttctggccgccgaggaagtcggacttgtaatcgctgctggcgatctcgttcatggccttctcgttgttggtgtaatcctgcgtatccatggtgatctgcttcatgatggcttcatcgcaggtcagcttcagcataacgtccttgatggtctcaaggttgtcgctgccggctgcgccgcagatccaggtgccgccccagtagtagggctgagggccttcgcacacagcgtagtcgccgtagatgccgttgccaacctcttccttgccgccctcagcggtaggagttgccagagagttgcccagcagggtgaagttgatgccccaagtggagtagaagaagccgaacaccttaccggtggggccctgatcggaagcccactggctgtcccacaggctggacttgttgttgtagcccttgtcggtgtactccttggtctgatccacccacttcatcaggttctcgtccacggtaacggtggtgccggtgacccaaggtgcagagacgttgttggagaaggtgcggtatgcatcgtcaaagccggacagcatcttgtagcccttggcagcagccttggcagctacatcgttgaacttatcccagtcggacaggtaggtctgcacttcggcggggtcatcggtgcccagcacctcctttgcaatgctgcggcggtatgcgaacagacccggggtagcctgccaagtggtgccgcgctggctgccgtccacagaaacgatatccttggtatactggtactggccggccagatcggaatcggtcaggccgatatccttcttgacatccagaacgtagtcggagtccacatacttcagagcgtagtcagcctcgatcaggaagatgtcgatcttgtcgtcatcggcagcggagtcctgattcagcagagcctcgtccagcttgttctggtagttgttgttctcgttggcgttgatggtccacttcacggtggtgccgtccttcagggtggtggtggacttgtcggctgcgatctccttgacctcgggatagtagtcgttgaagcggctctggaactcatcattccagcaccagatgttcagcaccttgccctcggcagcagccggagcagaagcagcagcggaggatgcgggagccgcagaggaagcagcagtgctgctggaagagccgccgccgcaggctgccagagcagcaccaatcgtcacgacaccggaagcgagcaggaaattacgacgagagatctttttcataagggtaaacctccttcatggttttccaattaaaaaattcatactcaaaaactccgcgccgggagttgtgggcctttgttaaaggatgcggacggagccgccgtccagcagtttgccggacacccggatctgctccggcagggtcacacgcggatgctcgatcagctcgatcagcttatccgctgccagcctgccaagggatttggtgttctgctggtaggtcaccagcgggggtttgaccacccgggagagatagatgccatcgtatcccatcaccgagatgtcctccgggatgctcagacccgcttcgctcagggcgttgtagccgcccagtgcggaaaagtcatccgggaagatgatgcaggtgggccgctgcggcagtgccagcagcgcccgagtctcctctgcgcagcggtccacatcgtggtacacaccgcagcggacatactcctccggcaccttcaaccccagttcctcgcaggcttgatagaagcctgccaagcggttctcggtaacggcggtcttttcgccgtggataaaggcgatgcgccggtgtccgcaggcccatgcctgctgtaccagagcctttgtgccaaccacgttgtctgaaaggatcgccatccggttgttgaacacatggtcgatggtcaccaccggcacatcgccgttgaccagctccaccacctgcggatcgtaaaagttcacgcaggcgatcaccacgccgtccacaccccggtagtggcaatgttccagatagctcatggacttgccgctgatgttgtggttgatgaaggtgatatcatagccgcgcttttctgcttctaccttgaagctgtccagcactgcggagaagtactcatgggtcaggccgctctgcttttcatctacgaacagaacgccaaggttgtaagtacggttggttttcagcgcccgggctgctgcgttgggcagataccctacgcggcgagccgctgcacggatgcgttcccgcgtggccggtgcgatgtccggctggttgttcagcgccttactgacagttgcgacggatacgccgcactcttttgccagatccttcagggacggcatcttatggcctccttccaaggaaaggagctgcggaatgtttctcgcgagttccttaatcgttttcgcaatctcaatatatcgcattctgcaccaaaaatcaagcgaaaacgtaaaagttttagctcagctgcatcacttttggcatttcgtttcaatttcacctgtaataattgtgcacttcgattcactttcgttacatttcgattaaaatagaaaaattttcgttgcagtttcgttatggttttcggtgtcaaaggccgtatgtatatattacttttaaaatggggtttcgggtccttcgttctgtctttcatcggtatgcgcagcaccgaaagccgtcgaaaactgccggggctgcgcagattattttaaaatttccgccgagatttttgcaaaaagctcttgcattttttggtgggatacggtatgcttagcgtgatgagattgcttctttcgcaacgccttaatcgttttcgcccatcgacgcactgcccgcccgacaaggcgcagttttaaggaggaagcattatgaagttcggatattttgatgaccagaataaagaatatgtcatcaccaccccgcagacgcccctgccgtggatcaactaccttggcagcgaggacttcttcagtctggtctccaacacggcgggcggttacagcttttaccgggacgcccggatgcgccgcctgacccgttaccgctacaataactccccgctggacatggacggccaccggatctacatcaaggacggcgacaccgtgtggaacccgggctggcagcccaccaagaccccgctggacagttacagctgccgccacggtctgggctacactattttggagggcaaaaaggacggcgtgaccgctcggcaggagctgttcgtccccaagggcgatgcctgtgagctggaccgggtgaccgtgtgcaacggcagcaccatcgtcaaggagctggatctgttcagctatgtggagttctgcctgtgggatgctgtggacgacggctccaacttccagcgcaacttctccaccggtgaggtggaggtagagggcagcgtcatctaccacaagaccgagtaccgcgagcgccgcgaccactacgccgtgttctgggcaaactgcccggtggacagctttgacaccacccgggatgccttttgcggcgtatacggcggcccggcagacccgcaggccgtccgcgccgggcactgctccggcagcattgcccacggctgggcaccggtgggtgcactgcacatccacctgaccctcgcccccggcgagagccgcagcatcctgttcggtctgggttatatcgagaacccgcagcaggaaaagttcattgcaccgggcgtcatcaacaagacccgcgcccatgccatgatggagcgctacgctacggatgcacaggtcgatgccgcccgcgccgccctgcgcacccactgggagcagctgctgtccacctaccatctggactccggcgaggaaaagctgaaccgcatggtcaacatctggcaccagtaccagtgcatggtcacctttaatatgagccgctctgccagctactttgaaagcggtaccggacgcggcatgggtttccgggacagctgtcaggatctgctgggctttgtgcacatcatcccctcccgcgcccgggagcgcattctggatatcgccgccacccagtttgaggacggcagcgcctaccaccagtaccagcccctgaccaaaaaaggcaaccgggatatcggcaccggcttcaacgatgacccgctgtggctcattgccggtactgctgcctacctgcgggagaccggcgactggtctattctggaggagcaggtaccctttgataacgacgagaccaaggcgcagcccctgatggagcacctgcgccgcagcttcaactttacctgcacccatctgggcccccacggcctgccgctgatcggccgcgccgactggaacgactgcctgaacctgaactgcttctccgagcacccgggcgagagcttccagatcaccggccccagcgagggtcccgtggccgaaagcgtattcattgccggtatgttcgtcaagtacggccacgaatacgcccagctgtgcgaccatctgaatctgaccgaggaggccgctgccgcccgcaagcacattgatgccgtggagcaggccaccctgaccgccggttgggacggcgcatggttccgccgtgcctacgatgctttcggcaagcccgtcggcagcaaggagtgcaccgagggtcagatcttcattgagccgcagggtatgtgcgtcatggctggcattggcaaggagagcggacaggccgcgcaagcgcttgccagcgtggaggagcgtctggacaccaaatacggtgtggtgctgctgcagcccgcctacacaagctatcagctgaatctgggcgagatctccagctatcctccgggatacaaggagaacgccggtatcttctgccacaacaacccgtggatcagctgcgccgaagcaacgcttggtcacggcgaccgcgcctttgcggtgtatcgcaagacctgccccgcctatatcgaggacatctccgagatccaccgcaccgagccctacgtttacagtcagatggtagccggtaaggacgcccccaccttcggcgaagccaaaaacagctggctgaccggcacggcggcatggaccttcttcaatatcagccagtacattctgggcatccaacccaccttggacggcctgaaggtagacccctgcatccctcacaccctgtccggcttcaccgtgacccgccgcttccgcggtgctgtgtaccacatcacggtggataacgccgccggggtgcagcacggcatcaaggccgttaccgtggacggcaaggccatctccggcaacgttctgccgctggctgccgccggtgctgaggtaacggtgcaggtgaccatgggttaacccgactttctccgctttttcatattattctcctttctgtgaccaaagccgccgcgcagacctctgcacggcggctttggtttacaatgaaaatattttaacagcttaacgattgataatgcgctccgcgttgctctgcgcatagatagcggaattattttttttatttgcatttcagccaagcctgcgggcttggctgaaatgctttttcacgggaggggtcgtaatggtaaaatagcgcttccagactgcaaatgctgttttcctctgcgaccccacttgtgaaaatgcgtttggagcggcccgcaggccgcgacaaacgcgaaataaaaataatctttccgctgaagatggccagagcataagcggaggccattctaaatcgtccccttccctcttgcatttttgggaaaagaggtgtagaatacagtcacaatcaaacacaggggagctcgtgcagcgggctgagaggaagtatagcaagcttcgacccttttacctgatgcggataatgccgccgtaggaagtcataccctttatgattttttgcaggaggagtcgcgccgggttcctcctgtttttttgtacctctgcggaggttccgcagccagctgagggggagcgccctgagccttggatgaatgcagcgatgggaagccgtgttccggcgtgagaggaaaccagtaagtttcgaccgcaccttccgtacctgttcccgccttgtggcgggcacgggctgttttgttgcgggagcgccggtgttcgtcctgcgctgccgcagatggttgaaaaggagccaatttatcatgaagaatctctctgtcaaaaagcttgcccttgccggtatgttctgtgccctgtgcgtggtgggcagcgtattcagctttcccatgttcggcagcaagtgcgccccggtgcagcacatggtcaacgtgctgtgcgccgttctgctggggccgtggtggggtgtaggcgtggcctttgtggcttccctgctgcgcaacctgctgggtctgggcagcctgatggctttcccgggcagtatgttcggtgcgctgctgtgcggccttgcataccacaagaccaaaaacctgatcgccaccgtggtgggtgaggtgttcggcaccagcattctgggcggcctgtgcgcatggcccgtggccatcttcctgatgggcaagagtgctgcggatatcgccttctacgcctacatcgtgcccttcctcatctccaccgccgtgggtgcggtgatcgccggtgcagtggtgttcagcctgcagcgctccggcgctctgcgctccatgcagaacagcctttcctgagcggaggtgccgggaatgctcaaaaccgcctttgagaacctgcgcagccgcagccctctcatccacaacatcaccaactacgtcaccgtgaacgactgcgccaacatggtgctggcctgcggtgcctcccccatcatggccgatgatgccgccgaggtggaggagatcaccgccatctgcggcgggctgaacatcaacatcggcacgctgaacagccgcaccgtcaccagtatgctgctggcgggcaaaaaggccaatcagctgggacaccccgtggtgctggatccggtgggtgccggtgcttcccgtctgcgcaccgacaccgccttccgcctgctgcgggaggtgcagttcacagtgatccggggcaacatctcggagatcaagacccttgcctccggcgcaggcaccaccaagggcgtggatgcggacgtagccgacaaggtgaccgaggagaacttggacagcgccgtagcctttgccaaggcctttgccgcccgcaccggcgcagtggttgccattaccggtgctatcgacatcgtagccgatgcacaaaaagcctactgcatccgcaacggcaacgccatgatgagcagcatcaccggcacaggctgccagctttctgccctgacggcggcttttgtcaccgccaaccccggccacccgctggaagctgctgctgcggcggtgtgcgccatgggtctggcgggcgaggtcgcccaccagcggctcactccgcaggacggcaacgctacctaccgcaattacatcattgatgccatttacaacatgacccccgaacagctggagaaaggcgcaaactatgaagtgcgataaacacaccatgctcctgtacgcggtgaccgaccgcgcatgggtgggcgaacagacgttgtatcagcaggtggaaagcgccctgaagggcggtgctacctgtgtgcagctgcgggaaaagcagctgggcgacgccgattttttgcaggaggccattcagatccacgctctgtgccagcaatacggtgtgccgctgttcatcaacgataacgtggaagtggcgctgcaatgccatgccgagggcatccatgtggggcaggacgatatggccgccgcacaggtgcgccagcgcgtgggcgagggcgtgatgatcggcgtatccgcccacacggtacaggaagcgctggacgctgtggcacacggcgcggactaccttggcgtgggtgcggtatttgccacccacaccaagacggacgtgagcgagatgccccggcagaccctgctggacatctgcaacgccgtggatgtgccggtggtggccattggcggcatccacaaggagaacatcctgcagctcaagggcaccggcgtggacggcgtggcgctggtaagcgccatctttgccgcaaaggacatcgaggccgagtgccgggagctgcgcgccctttcggagcagatcataaagtaagctatcatcccgcggcaaaccgggggcaccaccttgggccgcgttacaaaattcatggagaaaaccaacatgaaaagcgtattttgcgcaggtgccggcatccagagcatactgttttttctgaatgacggctacctgtctgccacccttgcctgcgggtcgggagtttctccgaggaccgtccgctggggtgggaccctgctgccgcaggcagtagggcgggcgatggaatggcccgattcgtgtccgaggagaaagctcccggcacacaggctgccccgtatcactgtatgaccagcaccctgctgttcagagataaactgtcatttggaggaacacagcgtatgcagacttataccacccagatggatgccgcccgcaagggcatcatcaccccggagatggagatcgtagccaaaaaggaataccgcaccaccgaggagatccgccagtgggtcgccgagggcaaggtagccatccccgccaacaagcaccacaagtgcctgaaccccgagggcgtaggctccatgctgcgcaccaagatcaacgtgaaccttggcgtctcccgcgactgcaaggactacaacatcgagatgcagaaggtgatgagcgccgtgaacatgggcgcagaagccattatggatctgtccagccacggcaacacccagcccttccgccagaagctgacccacgagtgcccggtgatgatcggcactgtgccggtgtatgattcggtcatccactaccagcgggatctggctgagctgactgcacaggacttcatcgatgtggtacgcctgcacgcagaggacggcgtggactttgttaccctgcactgcggcatcacccgtaagaccatcgagcagatccgcaagcacaagcgcaagatgaacatcgtgagccgcggcggctctctggtttttgcgtggatgagcatgaccggcaacgagaaccccttctacgagcactttgacgagatctgcgagatctgcgccgagcatgatgtgaccatctctctgggcgatgcctgccgtcccggctgtctggctgacgccaccgacgtgtgccagattgaggaactggtgcgtctgggcgagctgaccaagcgtgcatgggcgcacaacgtgcaggtgatggtagaaggccccggccatgtgcccctgaatcaggtcgccgccaacatggaggtgcagaagagcatctgcatgggcgcacccttctatgtgctgggacctctggtcaccgatatcgcccccggctacgaccacatcaccgctgccatcggcggcgcagtggcagccgccagcggtgcggccttcctgtgctatgtgacccccgccgagcatctggcactgcccaatgtggaagacgtaaagcagggtatcgtggcctccaagatcgctgctcacgccgccgacattgccaagggcatcccccacgcccgggacattgacgacaagatgggcgatgcccgccgcgtactggactgggatgcacagttcgcctgcgcgctggaccccgagaccgccaaggccatccgcgacgcccgcctgcccgaggacgaccacagcgacacctgcagtatgtgcggcaagttctgcgccgtgcgcagcatgaacaaggcgctggccggtgaatacatcgacattctgtaagctttccccgcgctgaaaggcgcttcttcctccgccgcccggcataaccgggcggcttttatgttgataacaaaaaagattgaccgccccacagttccccaactcgagcggtcaatcttttgacatacgggatggaaagctgacccttgcagtcagcgccccttctgtttgtagaataatcgaatctatgtgatttgtcaagccattccattctatcgattctttctatcaatattttagattttacaattcttctgtgctgtactataataaagcagcaactttattactcaaaagtacaggaggctgttttcttgatagttgatctgatcgaagcgctttaccgcctgctgtggggcgatttattcaccctgccagtggcgggcggcattggcatctccttcatggtggtgcttctgtttgcagccggtatcggcttcaccctgcgcacaaggctgctgccggtgcgcctgttccgggatatgatcggcgcggtgtgcgaaaaaaagcaggctgcgggcgggctttcctccttccagacactggtcatctccaccgccacccgggtaggcatgggcaaccttgtgggcgtggtggccgctgtttcggcgggcggcgcgggcgcggtgttctggatgtgggtcaccgccctgctgggtgcttccacctcctttgtagagtccactctggcgcagaagtaccgcgtaccggacccgctgtacggcggctggcggggcggcccggcctactaccttcatgtgctggcagagcgcaagcggggcaaaaagctcaagcgctcggtgtgcgcagcgctgtttgcagtgtccggtctgatctgctggtgcggcatcagtcaggtgatttccaactcggtcagttctgcctttgaaaacgcctttcacgtcccgccgctggccactaccgtggtgcttaccctgctggcggcgctgatcgtgctgcgcaaaaacgccactgtaaaaagccttgacttcatcgtgccggtcatggcggtgtgctactttgtcatcacggtgggcatcgtggtgctgaatctccggcagctgcccgccgtgctggcacgcatctttgccgaggccttcggcctgcgtcaggtggccgcaggcggctttggcgcagtgctgatgaacggtgtcaagcgcgggctgttctccaacgaggcgggcagcggctctgccccctgcgccgctgccgctgccgagtgcgatgacccggtaaagatgggtcttgtgcaggcgctgggcgtgttgatcgacaccgtggtcatttgcagctgcactgcctttctgatgctgctggtgccgcaggagatcaccgccgggctgaccggcatgaaccttttacagactgccatgcagtaccatctgggcagctttggcatcgtgttcattgcggtgatcttagcactgttcagcttctccacctttctgggggtgctgtactacgcccggggcaatgtggcctacctgtgcggcgacaactggtggagccagaccgcctacaagctgctggcgctggccatgctgctggtgggcggcacacaggcctacaccgtggtgtgggatctgggcgatgtgggcatcgggctgatgaccatcttcaatatgctggcgctcgttcccctttccggcgaagcgctggccgccctgaacgactacgaaaagcgcaaaaaaataaaataagatcacaaaaacgggctgctgcacaaggttctgtgcaacagcccgttttatattcgctcctaaatccagaaagtcagcatttatttacagatacttttactttagcttgctcgccctctccgtctttgcttcgcaaatccacctctcccaaagggagaggccttggcaaagagatgaagtttgcgtggactgccaaaggctctccctttgggagagctggcgcgttagcgcctgagagggcgaggtcgctgaccatgtgtagcagcccgttttgtaatatgctaaaactttcagctatgctgcttcagggcgcagacggcgatgctcaatgcgctccatgcggcctgatacatcagcaccgtggcgatggacagctgccagatgctgcccgcataggtcagcagcaccgcaatgaacaccgagaagcataccgagaccagctgcaccgtggtggcgctggtctcggcattctgtgcctggtctgcggccggcaagccgccagtcaggctggcaaagcccctgtggtggtacaggcagcacttgggctttgccggggctgcatcggcggcttcaatagcctgacactggtcgccgtccagtaccgtgaccatgccctccggcagatggtaggcctcggtgatgtgccgcgccgtcaggctgggatccttgctggtgaccagcagacggatgttctccctttgcagagaagcaagactgcgtgccacattgcggccgcccacatagcgcagcacgaacatggcgtgcaggttgccggacactgccagatacaaaatttgcagctcgccattttgggagtggctgtcctcgtaatcctgctccggcagggtaacaccctcctgctccatgtagcggcgggtgccaatgaggatgcggttattgtcgcaccatgccgagaagcccagcccggtgtgctgctccagatccttgaccgggaacaggatatcggtgcggtcctcgatgatctggcggaacagcccgcgcagggtgtcgcagctctcgttcagtacacttgccgcatacaggatggcgcggtcgatgcggccgcccttgaagatgcggatatcctccagcgtcacgctgtcagcggtaaacaggtcatcggcatccagctcaatggtgtcgatgccgcccagctcctcaatggctgcccagccgggcaccacagcgcccacagcggcggcagctctttgcagccgcagcgccgccagacccggcaccagcaccgaggaaaggggtgcgcccatgcacagcacggcagcagccgcagccacagcgcagttgatgccgccgccgaacagcaggaaggctacgccgctgagcactgctgccgccagcagaacacaggccaccttgcgggcgcagcgctcgctggcgcgctcgctgagactctgctccacaaagtcatcgctggcagtctgcaccgggcggctcagcagcacccacggatccttctgctccagatcccgggcgagggcgcggatcaggtctttatcgcgggtgcggtaagcaccccgcagttcgccgccctctgccgccagcgcgtagccgccctgcacggcagacagcatcacccggctgcccaccagcgccagaaacagtcccagcgccgccataccggtcagcagaccgatgccctcggtgctgcggtaggcgttggcattcagcatggccaccactgcctgcagcagcgctgccacagcagccagcgcgggcatggtgtccgcactgggacggccgcgcagaccggtcagaccgtcccgcagcaccgggtagcccacaaacaggctggcggcaaacagcagcagattggcggcatagaacgccgccggggcagcgtccgggtccagcaccgaaagcggcggcagcagacgctctgccgtcagcccaaggtgcagcagcactacggccagaatgcccgccagcacacaccgcaaggtcagctctgcggccatgtggtgcagtttgtcagcgatggattccggcacagcttcctcagtaggaacagctgcttccggcgcggtctccggctgtgccggggcggcgggggcagcatctgccggtgtgggagccggctcagcaggagcgccgtcctgctccagcgggagcagcggcaggctcatggtatcctctttttccggcttgcgggcagcgggcttttcgtcctctgctgtgccgaacatctggaaaatcgactttttctcaggctttttcggcagcgtttccgggtctgccggagcgctggcaaacaccaccggcggcagttcctcggcggccttttgtgcagcctttgccggggctttttccggctctgccgcaggctgtgcaggcgcgggctgcacctttggctgcggcgctgcctgcacgggctttgccggctgcggggcaggctttgccttgccgctcatgccgttgagcatatccttcagctgctgcatctcccgctgttccagttcctcctgcggcagcagcgtctccggggcgttcttcgccttgggctgcttttggggggccgcaacaggctgcggctccggctgggatgcagactttttcggctgtggcttcacggcagcagccgccttgggtgcaggcacaggctctgccgggacggccttgacaggctctgggcgggcgggctgcatcggcattaccggaacagggtctgcggtgcgcagttccagcgccatgtcctcctgctccggctgtaccggctttgcatctgcccccagcaggatctcgccggtggggatctccagcaccggctgtgccgcggcgggcgtttcttctttatcgtggccgaacagcttgcccagcagcccggccttgggcttttcctccaccggagcaggctcgtcccggtgggtcatctcctcgggcagatcgatcacactggtgctgaaaaagttgcggaaccgctcttcagccgagagctctcccgtctgcttgcccttgcgttcatttttattgttcggcatccttgtccctcccactgttctggatggagtttaccgcttgttttattcttctacggcgcgctgcgactggatctcgtacagaatgatgcctgccgccaccgaaacgttataactgtccacgccggtaccgggtgcagccatatccagccgcaccacaccgtcgcacagcttctttaccagctgggataccccgctgccctcgctgcccagtaccagcgcgatggggccggtcaggttattcttgcgcagggagacgccgtccatgtcggcgcagtagacgaacacgccctgctccttcaggcggcggatggtctcgccgatgttggccacacgcgccaccggcagacgctcggcagcgcctgcgctggacttgatgacggtgggggtaacggatgcgccgccacgcttggggatgacgatgccgtgggcaccgcacagcagggcgctgcgcatgactgcgcccagattatggggatcctcaatgccgtcgctcagcaccaaaaagggcggctcgcccttggctttggctgctgccagcagatcctccacggtcgcgtactcgatctcgcttgcaaaggccgccacgccctgatggctctcggtgccggtcatcaggcgcagcttgttggggtgcacccgcttgaccgttgcaccggcctctttggccagcgctgtatagtatgccgccactgccggagccatcccctcggcaataagcacggtgtccacaccggagccgctcttgagcagctcggtcacagggtttttgccgtagatcaggctctcgcttttctgctgcggctgctctgcatcgcggcgcggacggcgcggctggttacgttcttccatctttttatgctccttccgttccgggcgggcggtgccgcgccggagcgttttattctgtttatgataatccaagataaagtataccatatctcgcccggcttcgccacaaattgcagagattttattgcccggcgctaaaattttttcggtaaaaagcgttccttcctgccggtttcggcagctgtaaaaatgttttgcccgctgcccggtcggcggggtgcaattccgccgttttgccaaggtcaaaagttttccacaaaaaacgtctatacattccgtaaacgctctgtagtttttccacaagttgaaaactcggtggaaagtgtgtaaaagtccagccatagcgcccgtttttcgggtggaattaaacagtttccaccgggttttcaacagcaggttcctccacatcttggcaaaagccttacaatttgtaaaattcaagtcggaattatgacaattttttgaaccggaaattgtccgcttttgcaattttctccaacatcattttgacgaatgttaaaatgtgttgaaaacccgcgtcatcgatgcacaaggcagatgttgcagcatatatggatttttgtcgccaggcgcagaacatttctgccgctgctgcatcagccgctttgtgccgtgcctgttccgcagcagctctatgcaagaaaaagcacttgttcggattgattttaggcgcagtttggggtatactaaccatgtgggctcgttaaaccatgcacaatgcggtgtgtggcagagccggaaccccgataatttttggaggtaatgaataatgttggtaaatgcaaccgaaatgctgctcaaggcacgcgatggccactacggtgtgccgcagttcaacatcaataatctggagtggaccaaggctgtcctgaccgcctgcgaggaaatgaagagccccgtcattctgggtgtttccgagggtgcaggtaagtacatgaccggcttcaagactgttgccgctatggtcagcgctatggtcgattccatgggcatcaccgttcccgttgctctgcatctggatcacggcacctacgagggctgcaaggcctgcgttgaggccggcttctcttccatcatgttcgatggcagccactactccatcgaggagaacgtggaaaagaccaaggagctggttgctctggcacacgctcacggcatgagcatcgaggccgaggtcggctccatcggcggcgttgaggacggcgttgtaggcgctggcgagatcgctgatcccgaggagtgcgcaaagatcaccgctctgggcatcgacttcctggctgccggcatcggcaacatccacggcgtctaccccgcaaactggaagggtctggacttcgtggctctggaccgcatccataaggccaccaacaacattcctctggttctgcacggcggcaccggcatccccgacgagatgatcgcaaaggccatcagcctgggtgtttccaagatcaacatcaacactgagtgccagctggtgtttgctgaggccacccgtaagtacattgaagagggcaaggatcagcagggcaagggcttcgacccccgcaagctgctggctcccggcgcaaaggccatcgaggccaagtgcaaggagaagatcgagctgttcggctgcgcaggcaagggctaagcaaaagctcgtatcctaaccggtacaccacccaataaagtatgcggctccgccgcactgttatgcacagtgcagcggagccgctttttggtttatatgcgagcactcagccgtgggtcgtttccatatcgccagaaatggattgcatacagtcccgcacccagaagcagacaaaagatcgaatagctaaggatcggaagccgtagcagtacaatcttacccgcgatctgggtaaagaaccagcccgttccatacagaatcacgatataaagcaccagccatgcagcatatttcagccaatgctctcgcggcggaaagcccacctgctccatcatccggcggaacagtatgcaaaacgccgccactgcaacaacaagctgcatcagatagcctaccgaaagctcaaaaacccaatttccaataatcggatagagcagcaacccttcaatgccccacccaaaaaagaaatacagaggtgcaacataccagaagtaatccccggctctcagtgttttcaagctgggcttgacctcgtccacaaaggtctttgcgtccgaaatcgaatgaaacagttcctgattttccgtgttgacttggatggcaatatcaagcaaatcgctgcgcaccagttcgatgccacagaagtcccagctgacccggcgaagatagcgaatcacttctttaagttgctcctgacttttttcagtcagcaactcggtacgcatccggtttgtttttcgcaatgcaaaatacttattcatctggctcctccttaaaaattttttccaccagctggcaaagttggctccaatcctgccgaaactcaagaagcgccagccgtccttcttccgttacaatgtaatattttcggctcggtcccttgggagaaggtctgcgctctaccgtaacctttccctgctgctccaagcgcaatagcagcggatagagcgtgctttcacttaagtcagaaaatccgacctgcttcaggtgcatcacgatctcatagccataggtcggctcttgcgcaatcaatttcaggacacaatattccagaacaccctttaaaagttgtgcattgttttccataagtcctcctctctgctagtatgtaatgcgtagtagcttatctatattgtattacatagtagtatttctgtcaagttctgacctattagcattacaaccaaaaatcacactatatttttatgcaataaaaaagccctgagatttctctcagagctttctgttaagtcggcgactacctattttcacaagccgtttccagctaactatcttcggcacaagtaagcttaacttctgtgttcggaatgggaacaggtggaaccttaccgtcatcgacaccgaccgatttgactgaatcagtataacacatttctgtgcttctgtccagtatttttactgcaatccagcttttcgaatcgttggcaacaacagctggattgcgtttcgcaacagatgctgttttccaagactctcaatcctgtcttgcgattgaaggacgtgccttcaaaactgaataatcactgctgacattttttcgttgacttaaaagtctcaagcgaattgtggtcaagccctcgacctattagtacacgcttgctgaatggatcactccacttacacatcgtgcctatcaaccttgtagtcttcaaggggtcttacttgtttgaaacaatgggatatcttatctttgggtcggcttcacgcttagatgctttcagcgtttatccgatccgtacatagttgcccagctatgcccttggcagaacaactggtgcgccagaggtacgtccgctccggtcctctcgtactaggaacagctcccatcaaatatcctgcgcccacgacagatagggaccgaactgtctcacgacgttctgaacccagctcgcgtaccgctttaattggcgaacagccaaacccttgggaccgaatacagccccaggatgcgatgagccgacatcgaggtgccaaacctccccgtcgatgtggactcttgggggagatcagcctgttatccccagggtaacttttatccgttgagcgatggcatttccactcacataccaccggatcactaactccaactttcgttactgctcgacccgtcagtctcgcagttaggctcgcttctgcgtttgcactcttttgcttgatttccgttcaagctgagcgaacctttgaacgcctccgttactctttaggaggcgaccgccccagtcaaactgcccacctaacaatgtcccccgccttgattcaaaggcgcaggttagaattccaatatcgcaaggatggtatcccaacggccactccacaaatgccaaagcacttgtttcccagtgtcccatctatcctgtgcatgcaacatcgaaacccaatattaggctacagtaaagctccatggggtctttccgtcttgtcgcgggtaaccggcatcttcaccggtactacaatttcgccgggcgggctgtcgagacagtgcccaaatcattacgcctttcatgcgggtcagaacttacctgacaaggaatttcgctaccttaggaccgttatagttacggccgccgttcactggggcttcgattcaatgcttgcacatctcctcttaaccttccagcaccgggcaggcgtcagctcgtatacgtcatctttcgatttagcacaaacctgtgtttttggtaaacagttgcttgggccgattctctgcggctccatctctggagcaccccttctcccgaagttacggggtcaatttgccgagttccttaacaacccttctcccgttggccttagaatcttcttcctacctacctgtgtcggtttgcggtacgggcaccgcagaaatacacacagcttttctcgccatcttccatcccggacttcggtactaacttccctcgatcgctaccggaaccaacacccggctccgagacttcaaatgtgtccctgtgtttaactcttttggtggtgacggaatctctaccgtctgtgcatcggctacgccgttaggcctcaccttagctcccgactaacctggagcggacgaaccttcctccagaaacctgaggctttcggccatgcagattctcactgcattcgcgctactcattccggcattctcacttctatacactccacagccgcttgcgctactgtttcaccgcgtatacaacgctcccctacccaatacattgctgtattgcctaagcttcggtgtcaggtttagccccgttaaattctccgcgcaaagacgctcgaccagtgagctattacgcactctttgaatgtgtggctgcttctgagccaacatcctggttgtctacgtatcttcacatcgttttccacttaacctgactttgggaccttagctgtagatctgggctgtttcccttttgacaatgacatttatctgacactgtctgactcccaagcatcaatactctggcattctgagtttgataagcttcgctaacctctcggccgctaggctattcagtgctttacctccaggtatctaacttaaggctagtcctaaaactatttcggggagaaccagctatctccgggttcgattggaatttctccgctacccacagttcatccgccgccttttcaacggaggtcggttcggtcctccatggaattttacttccacttcaacctgaccatgggtaggtcacccggtttcgggcccattgtatgcaacttaacgcccttttcaaactcgctttcgcttcggctccagaccttaagtccttaaccttgctgcatacaatcgctcgccggaccgttctacaaaaagtaccctatcacacattgacgtgctctaggtgcttgtaggcacagggtttcaggttctttttcactcccctcccggggtgcttttcacctttccttcacagtactatacgctatcggtcactgggtagtatttagggttggagggtggtccccccgtattccgaccaggtttcacgtgtctggccgtactctggatcctgcgcagctctctccgttttcacctacgtggttctcacactctctgaccggccttcccatgccgttcggttaacagattaagtcctaaaagcagtccgtaccccggaagtatttctactcccggtttgccctcttccgcgttcgctcgccactacttacggaatctcgtttgatgtctcttcctcgccctacttagatgtttcagttcaggcggttccctcgatatacctatttttaagttcagtataacgtacctgagtatgaacccaggtgagtttcctcattcagaaatctccggatcaatgcttatttgcagctccccgaagcttatcgcagcttatcacgtctttcatcggctcccagtgccaaggcattcgccctgcgcccttgttcgcttgacctttcaaacgttctttcaagaacatttggtatcctcttgattctctcttgccaacgaagattattgttacccttccttttgaaattgtaatatttcttaaaaaagaacttactataatctttgtttcgcagttattattcagttttcaaggtacgtctttgagtgtccttttcagggccctcaaaatcgaacaatatctacttaaactttaacttgtcacctgttccaatgatcgaccatcttagatgctctgtcattgcctgactccttagaaaggaggtgatccagccgcaggttctcctacggctaccttgttacgacttcaccccaatcaccagttttaccttcggcggcgtcctccttgcggttagactaccgacttcgggtccccccggctctcatggtgtgacgggcggtgtgtacaaggcccgggaacgtattcaccgcagcatgctgatctgcgattactagcaattccgacttcgtgcaggcgagttgcagcctgcagtccgaactgggacgttgtttctgagttttgctccacctcgcggtcttgcttctctttgtttaacgccattgtagtacgtgtgtagcccaagtcataaagggcatgatgatttgacgtcatccccaccttcctccgttttgtcaacggcagtctggccagagtcctcttgcgtagtaactgaccataagggttgcgctcgttgcgggacttaacccaacatctcacgacacgagctgacgacaaccatgcaccacctgtctccttgctccgaagagaaatactgtttccagcatcgtcaagggatgtcaagacttggtaaggttcttcgcgttgcgtcgaattaaaccacatactccactgcttgtgcgggcccccgtcaattcctttgagtttcaaccttgcggtcgtactccccaggtggattacttattgtgttaactgcggcactgaaggggtcaatcctccaacacctagtaatcatcgtttacagtgtggactaccagggtatctaatcctgtttgctacccacactttcgagcctcagcgtcagttggtgcccagtaggccgccttcgccactggtgttcctcccgatatctacgcattccaccgctacaccgggaattccgcctacctctgcactactcaagaaaaacagttttgaaagcagttcatgggttgagcccatggatttcacttccaacttgtcttcccgcctgcgctccctttacacccagtaattccggacaacgcttgtgacctacgttttaccgcggctgctggcacgtagttagccgtcacttccttgttgagtaccgtcattatcttcctcaacaacaggagtttacaatccgaagaccttcttcctccacgcggcgtcgctgcatcagggtttcccccattgtgcaatattccccactgctgcctcccgtaggagtctgggccgtgtctcagtcccaatgtggccgttcaacctctcagtccggctaccgatcgtcgccttggtgggccattacctcaccaactagctaatcggacgcgaggccatctcaaagcggattgctccttttccctctgctcgatgccgagccgtgggcttatgcggtattagcagtcgtttccaactgttgtccccctctttgaggcaggttcctcacgcgttactcacccgttcgccactcgctcgagaaagcaagctctctctcgctcgttcgacttgcatgtgttaggcgcgccgccagcgttcgtcctgagccaggatcaaactctttataaatgatatttatcacttaaaagtgttaaatcttgtttcgctcagcacgcaatcgcttgcgtcctgtgtgaattacttttgtttggaattgtttaccgtgtttttccaacacgaaaataggttccgttacaagttctttcgatattgttcaattttcaaggtcctgtgcgccacagccttgcggctgacgacttgattattttaccacagaagcggtttttttgtcaagcacttttttgagaagcttttgaagttttttgaacttggattgctttgagtttctcggtatcagccggaacttttcagcgtctattggttcttttcaagggcttcctgctgaggtttcagaagtcattcttttgtctcagcgcttggcgctcacatatagtaccataccgcaaccacttttgcaagccttttttgcatttttttcgcctttttttgcgctttgtatacatcgtccagtttttcgctcagtttcaggggatgttttgacctttcttccaccatttccacgcaaaaacagccgccgcacaaaaagtgcagcggctgttgccttgagattcagttcttttcttcctgcttcatctcccgcagggtcagccagacagccgccgccagcatcggcagcgcggcgatcagaccaatgggcatgggtcccagcacattataataggtatctgccggggtgaccagcacctgcggcagcgccgcaatggcgttgaacgcgccgtgcgcaatggcaggcacccagatgctctccgttttctcatagaggatatccagcagggtgttcagggcaaagcagaccacgcaccacaccacaagacccagcaggggtgcgcccagatagttggtgccgtactcgtagcccaccagcagcatcagcggccaatgccagacgccccacacaacgccgcccagcaggcggccattcagcagaccgaaccgctccttcaggcggggcatcatgtagccgcgccagccgacctcctcacccagtgcgggaaacatattgatgaccggggcaaggagaaccgcaaacagcccgttttgcagcagatagctgagggtggagacgcccagctgactgcgcagggtctgggcgtccatctcgccgccgtaggcggcaaccagccagctgccggaaaagtccagtcgggaggggaacacggcaaaatacagcacagcgccaagcagggtgagcaccgccgggccgaaccatgccgccagccagaaccgccgcttgccctgcaccttccagccgatgccggtgggctggcgcaggaatgctttttgcaccagcagtacagccagcagcggacagaacatggtgacaatgagcgccagctgatacagcacggtgttattctgctgcaaaagcgccatgcagccgcccacctgacacagccatgccatgccaaaggcgaacaggaagtataggccgaagccctgtttttcttttgctgtcatacgaatctcaccgccgttccgtaagcaatgacctctgctgcgccctgcatgacgctggcggaggcgtaccgcattcccacaacagcatctgcgccaaggctttcggcatccttgaccatgcgcccggtggcgatctgccgcgcttcggtgagcatctctgcgtagtcggtcacctcgccgcccacaagggtgcggaaaccggccatcatgtcgtggccaaggttgcggctctgcaccgtgctgccccgcaccacgcccagcgcttccagttttttgcccgggatctcgttaatagttacgataagcatcttcttctccctttccgatctcttcgatccgatccagcagcaccttcagggtgcctacgatgcagcccgccgggatgccgaacatcaccaccaacagcggcagcggcggggcatcctgcgggtcggtgtagattgcccagcccatagtggcaattacaaaagccatcatggtcacaaaaagggcagcaccgatgcaggcaccccggatgcggcgggtcttttggtcagtccgttcaatgttcacaaaagtcactccctgttcttcccgtgcggtcaggcgcgccagcgtctgctccacatccagttgttccagagggccgttttcctgttgcagcagcgtgcagaaaccgatggcttcctccaagtcggcgcggcggccgcgcagacgttccagctgctggctcatgccctcagccagcgtgcgctgcccttccagcatctcccggatctctgccagcggcacgtccagcttgcgcagcagcttgatgcggcgcaggcgctccacatccgcctgcgagtagctgcggtagccgttgcccggctcccggctggggctgatgagcccctcttcctcataaaagcggatgttctttttggtcacgccgacggcggcttccacttcgttgatcttcatgggtcacgaccccctccttacgggagtattctacaccttccacaaaggggaaggtcaagccttttttgcaaaaaagctgccgcacaaagtcgtaccgcagctccttcctttaaaaatagcacttgatctggaaacggtcggcgttgtcctgctttttctccactacgatgtgctcgtggttgaagtcgaagtgcaccggggtgcacaggtcggtattgcgggtcaggcgcagcagctcctgcacacgcttcttttcctccggcacatagaacaggtagctcacgccctcttttttggcgcggccggtgcggccgatgcggtgggtgtagtgctcgttctcgctgggcacatcgtagttgatgacggcatccacatccgaaacgtcaatgccgcgggcagcaacgtccgtagccaccagaatggccagcttgccgtcccggaaggcctgcatgatctggttgcgctccttctgggagaggtcgccgtgcaggcagtccaccgagaagcccagccgtgccagctgatttgccagcgtggcggtgttgaacttggtatcgcagaataccatcacccgcttgtaaccctcgccaataatgatctgcgccagatccgacagcttgttgcggccggaggtctccagcatatactgggtgatcttgggctggctttcctcccggggctgcacggtgatctcctcggcattgtgctggtacagccagccgatatccatcacctcgcggctgatggtggcggagaacatggacagcgccttgcgggccttcatcatctcgatgatgtggcgcacatccttataaaagcccatgttcagcatctcgtcggcttcgtccagcacgatctgggtcacataggagatatcgatgctgtggtgcttgtagtgatccatcagccgccccggggtggctaccacgatctggcagccctccgccagacgctttgcctgcttttccatattggcaccgccgtacacgcaggccacctgcacctcgggcataaagtaggtgaggttagtcagctcctcggcgatctgctgagcaagctcccgggtaggtgccatgatgacggcctgcgggtatttattttccggctggatatgctccaccaccgggatgccgaaggcacaggtcttaccggtgccggtgggtgccttggctatgacatcatgccctgccagcatgagggggatggtcttttcctggatctcggtcatttcggcaaagcccatgcgttccacagccttgtggatggcttcgctgcactgcaactcgctgtaaagcatttggacaactccgttctttgtggcgttttttctcgttgcaacaagtatagcatgaaatgccgcgcttgtcagcagagaaacaaaaagaaccgcacccgggggcacgggtacggttctcagtgtgcagaaatcaggcggtctcttccacgctcttcttgccggcttccagcttctgcttgaagcggccgctggccttgaagccggggatggaggtggactccagctggctggacaccttggtcttggggttggtgtaagccttcggcttgcgggggcgcatctcaaagcggccaaagccggcgatggtcaccttttcgtcagcgcgcaggcagtccgcgatctggtcaaacattgcatccatcgtggtctcgacctgagcttcggtaaagccggtcttgcgtgccacggtttcgatcatctgggaacgggtcatgtatcgatatcctcctggaatgtccaaaagtaacgtcttttggcaaattttgcgttgttgagtataacatatttcacgcactgttttcgatggattgcgcacgaaatgtaatttattgcgcacgaaccacattcagttccgtgcaccccgcacaaatacagcgcccaccgtttcggcaggcgctgtacagaactattttatgcgggtctcagggcttatttgccgcggtacagggtggcaatatccaccagcgggatgttagccaaactgtgctcgctgcgcaggcagtccaccagagaagcggcggtatccactgcggtgatgcaggggatgctcagctccacggccttgcggcgcagacggacggaatcgcgccgggggtcacgacccttggcactggtggagaacacatagtccaccagaccgctctgcagcagatccacaatgttgggagcctcgccggagatgttgcgcacctcgttgcaggggaccatgtgcttgttgagccatgcacaggtgccggaggtaccgtagagcttgtagcccatatccttcagcttccatgcaatatccacgaactcgggcttgtcgctgtccttcacggtgaagatgcagcagctgcccgggccgggggtcttaaaggtatagcctgcaccgatcagacccttgagcagggcatcgtggtagttgggcgcaatacccagcacctcgccggtagacttcatctcggggccgaactgggtatccacggcgtgcagcttttcaaagctgaacacaggcacctttaccgccacatagggggcgttggggtgcagaccggtgccgtagcccatatccgtcagcttctcgcccaagcagcagcgcacggccagatccaccatgggcacgccggtgaccttggagatgtaaggcacagtacgggaggagcgggggttcacctcgatgacgtacacgcggccatgggagacggcgtactgcacgttgaccagaccggtgacgtgcagctcgcgggcaaagcggccggtataatccaccatggtgtcgatctcgtcctgcgtcaggtgctgtgccgggtagacacagatggagtcgccggagtgcacaccggtgcgctccacctgctccatgatgccggggatcaggaagttttcgccatcgcagatggcgtccacctcgcactcggtacccatgatgtacttatccagcagcaccgggtgatccatatcgacgtgctcggtgataacgcccatatactcgatgatatccgccttgttgtaggccacgatcatgttctgaccgcccagcacataggagggacgcatcagcaccggcaggccgatctcctcggcagcggccagagcctcgtccagattgaacacggtacggcccggggcgcgggggatgttgcagcgctccagcagctcgtcaaagcgctcgcggtcctcggcttcatcgatggcatccgccggggtgcccagaatgggcaggccgatctcgtccatgtgcttggccagcttgatggcggtctgtccgccgaactgcaccacgcaggcatccggcttttcggtggcaatgatgttgtccacgctctccgggttcagcgggtcgaagtacagacggtcgccagtatcaaagtcggtggagacggtctcggggttgttgttgaccagaatggcttcgcagccgttctttttcagcgtccatacgcagtgcacagagcagtagtcgaactcgatgccctgaccaatgcggatggggccggagccaaagaccagtaccttcttctttttaggctcgcccttggctgcggtctcagcttccttctcagcgataaagcctgcggcctcgttgtcgccatcgtaggtggagtagaagtagggggtatttgcagagaactcggcagcgcaggtatccaccatcttgaagccggcgcggtagttctccacgggcagggtgtccacctttgccagacggcggatggtcttatcctggaagccgtacttcttggcagtcttgtactgctccaaagacagctggccgttgcactgtgccagacccttttccagatctgccagatgctgcatcttgtccaggaaccaccagtcgatcttggtgatatcgtagatgaccttgtggtcgatgccgcgcttcagtgcttcgtacacgcagaacacgcgctcggcgtcctgaacgtgcatatgctccaccacttcctcgtcggtcaactcctcaaagggcttgtgggtcagggtgtccatgcccagctcaatggaggaaacagccttcatcatggcggcttcaaagctgttgccgatgctcatcacctcgccggtagccatcatctgggtgcccagagacttgtcggcgtagacgaacttatcaaacggccacttcgggtacttgaccacgatgtagtccagcgcaggctcgaagcaggcgcaggtcttgccggtaacgtcattggtgatctcgtccagcgtgtagccgatggcgatcttggtagccaccttggcaatggggtagccggtagccttggaggccagcgcggaggagcgggacacacgggggttgacctcgatgaccgcgtagtcgaagctgtccggcttcagagcgaactggcagttgcagccgccctcgatgcccagctcggtgatgatatccagtgcggcggtacgcagcatctggtactcgtggtcggtcagggtctgggagggagccacgaccaccgagtcaccggtgtggatgcccacggggtcgaggttttccatgttacatacggtgatcacgttgcccttgtggtcgcgcatcacctcgtactcgatctctttccagccggcgatgcacttttccaccaaaatctgatggatgggcgaaaggcgcaggccgttggtgccgatctcgatcagcttttcgcgggtctcgcagatgccgccgccggtgccgcccatggtaaaggccggacgcacgatgaccgggtagccgatgcgatcggcgcagtccagtgcgtcctgcaggttctccaccacctcagaggggatgatgggctggtgcagcttttccatggtctccttgaacagctcgcggtcctcggcacggtcgatggtctcgggattgcaggccagcagacggatgccggtgcggtccagatagccggagcgtgccagctccatggacaggttcagacccatctggccgccgaggttgggcagcacggagtccggcttttcgatgtccagaatgcgctccacgacttccagcgtcatgggctcgatatacacatggtcggccacgtccgggtcggtcatgatggtagcggggttggagttcagcagaacggtctcgatgccctctgctttcagggcgcggcaggcctgcgtgccggagtagtcaaactccgcagcctgaccaatgatgatagggccggagccaatgaccagcacctttttgattctggggtccttcggcatttcagcgtgcctcctttgctgctttgacgttgttcaggaagcggtcgaacaggaattcggtgtccttggggccgccgtttgcttccgggtggaactgtacggtaaagcagttccactttttgtacttgatgccctcgcaggtgccgtcgttggcgttcacctgtgccacctcgcccatctcggcgggcagctcctcgcccacgaccgcatagccgtggttctggctggtgataaaggtgcggccggactcaaagtcggtcacaggctggttggcaccgcggtgaccgtacttcagcttcatggtcttggcaccggctgccagtgcggacagctggtgacccagacagatgccgaaggtggggatgttcagttcaaagatgtgcttgaggttctcgatgatttccaccggctcggcggggtcgccggggccgttggacagcatgatgccgtccggggcaagggctttgatttcctctgccgttgcaaaggcgggcatcacggtcaccttgcagccgcgcttgacaaggcagcgcacgatattgcgcttgcagccgtagtgcatcagcacgatatgggtctcgccttccgggttgaacacctcgggggcagcacaggtcacgttcttcacagcatcggtcacggcgtaggcgcggatctcggccagcagtgcctcggtctcggccttgttggccgggtcggcggggtcgaaggtggtcaggatggcgccgttcatcacgccgctctcccggatgatgcgggtcaggtggcgggtgtcgatgccctcgatgccgatggtgttgttctttttcaaaaagctgtccagcgtctcctcacagcgccagttggagggggtggtgcaggcttcgcgcacaatgtagccctttgcccagatgcggtcggactccatgtcatcgtggttcatgccgtagttgccaatgaggggataggtctgggtgatgatctggccgtagtagctggggtcggtcagggtctcctgaaagcccaccatgccggtggagaacaccacctcgcccacggtcacgccctgcgcgcccacggactgtccggcaaagaccatgccgtttgccaaaagaagatatgcgttcatagttttcctcgtttcaacaagctttcagtttacagggtctgctttgcttcctgcttcatcttgcggctgcccagatgcaccagcggcagcttgccctccttgcagatggggcactcctccggggtgtagttgggcagatccagcttcagggcgctggccagaatggggatgggagacggagcttcgggcttggtgcggtccaccacgcaggtgatgccaaggcagatgccgccggcctcttcgatgacgcgcttggtctccagagaggagatgccggtggtcaccacgtcctcggcgatgatgcacttttcacccgggtggatggcaaagcgcttcaggcacatcacgttgtccacgcgctcggtaaagatagcgcgcttgccggtctggcgggccagctcgtaggcgtacacgatgccgcccatggcagggccgacgatgacgtccacgtccatctccttgaccttgtcggccacagccttcatcacctcggcgcagcggtccgggtactgctgcagataagccatctggcagtatgcgccggagtgccggccggaggacagcaggaagtgaccctccagaaatgcgtcacagctcttcagaatttcaagtgcttcactcattgtacttctccctctcttttcagtggtgtatattcctttgggtggtattgtaccacgcttttgcgttatttgcaaatttatgcgctaagttttattttatgcgcataattgtagatattttatggatatatcagcttttattctgcatgacgggcgcagccgcggatctcgtccagcgttttcacgccgtttttgtccatccatgctgccatctcgtccgcaatggtctccatggcgcgggggtttgcaaagtttgcggcgcccacctgcactgcggcagcgcctgccatgatgaactccagtgcgtcacggccggtggcaatgccgcccagacccaccaccgggatgttcacagcccccacggcctgccaaaccatgcgcagggcaatggggcgcaccgccgggccggacagaccggcaaagatgttgttgaacaccgggcggcgtttttccagatcgatggcgcaggcctggaaggtgttggtcaggctgatggcgtccgcaccggcggcttccacagccttgcacatctcggggatgttctcggcctgcgggctcagcttgaccatcaggggctttttgcaggcagcgcgcaccatgcgcaccacctcaccggcagcttcggcctttacgccgtaggccatgccgcccaccttgacgttggggcaggagatgttcagctccacgatgtccactgcgctctcgctcagcatcgcagcgccttccacatactcttcctcgctgtggccgccaaggtttgcaatagccaccgtgccgtacttctgcttcagctccagcatctcgggcagttccacgtcaataaagtgctgcacgccggggttctgcaggccgatgctgttgatgagaccggagggggtctcccacaggcgctcgcccttgttgccgtactggccgtgcagggtaagccccttgccggagatgccgccgattttagcaaaatcggccagttcctcgtactccacaccgtagcccacggtgccggatgcgccgatgaccgggctgttcatcacaaagcccagcaggttggttttcaggtctgccatcagaagaacacctccgttgcgtcaaataccgggccgttcttgcacacgctcttgccctcgccgcccttggtctcgcaggtgcagccaaggcaggcaccaatgccgcaggccatcttcttttccatgctcacaaagcagggagtgcctttttcggcacacaggcgggcggcgttcttcatcatcacggtggggccgcacaccagcaccacatcgtaatcggcggggtcgtacagctgggtgacaaagccgtggaagcccaccgcgccggtgtcggtggacaccttgacgaggtttgcgatgctgcggtactcctccatgcagtagggggtgtcgcggaagccgaagaacacatccggctttaccccggcagcggccagctcgcgagtgagctggaacatgggcgcagtgccgatgccgccgcccaccacggcgatcttctgatacttgctcaggatatccggcacatcaaagccgttgcccatggggccggtgagctggaaggtatcctgctgcttgagctgcgccagcttctcggtgccctcgcccacaacctgatacaaaaactcgatggtgctgctgtccgggttccagcggtgcacgctgatggggcgggacaggaagggcgcttcatctgcgccccaggagcgcagagtgaagaactggcctgcgtggggggcatggtcgcggtccggccacaccacggtcagcaggcggatgtccggggcaatgacctcattgcgcaggacggtggcttcacagcaggctgcacgcatgagcaatggcctccttcatgttcacacactcgttgtaagcggcctcgtcaaaggcagtgcccggctgctttttgtaagccagcaggatgccgcggctggagttgaccacgccgccgttgcccttggtcaggtactgggcaatatcctcagccttgccgccctgtgcgccgtagccggggatcaggaagaagctgtcctgatactttgcgcggatctcggtggcttcctcgatgtgggtgccgccgatgaccagaccgatggaggagtagccgtgctcgcccatgtagtccttgcccagtgcgttcagcttgtcgcccaccagatcgtagacgtggcggccgtcggccagcttctcgtactcaaagtccttggcacctccgttggaggtgcggcagagtacgaacatacccttgccctgcttttcggcatagggcaggtaggggctgatggagtccagacccatatagggtgccagcgtaacgaagtcgctctcgaaatcgccggtaaagtgacccatggcgtacatctcggcggtcttggcaatgtcaccgcgcttgatgtccgcgatcaccggcacaccggcctcgcgcacagccttcagggtgtcggcgtaggccttcatgccctccatgcccagagactcataataagcgatctgcaccttgtagcagccagccacagccttggtggcatcgatgagcttcttgttgaagcgcacgatgttctcgcccttggtcagggtgctgtccacaaaatcagcgggcaggtagctgaagtcggtgtccagacccacgcacaccgggccgcgggcttccacagcttcgtacagtttgtccatgttcgtcatttgggtgtcctcctgtaagtcgtatttatagaaaatgaattgtaactatgggttttactcctcggcctgataggtgatcttaccggccttgatggtggcaaacaccttgccgtaaagctgtgcaccgtcaaagggggtgttgtggctcttggagtgcagcttttccttttccaccgtgtagggggtgtccagatccaccagcacaaagtcggcatcaaagcccggctccagctgacccttggcaaggcccagaatctcggcggggcgggtgctcatcaggtgcaccagcagctccagcggcagaccctcctgcttgcagagcttggtgtagcacacgccaaaggcggtctcgctgcccaccataccggccatgcccttcagcttatcctcttcggagtggggtgcgtggtcagtggcaatggcgtccacgatgccggtgcggatgccctccaccagcgcttccacatcgtcggcggtgcggatgggcgggttgacccggtagtcgcaggtatcgttggtaaaccacaggtggtggggggtcacctcacaggtgaccggtgcgccccgcagttttgccatacggatggcgtccagcgcgccccgggtggacacatggcacatatgcagccgggtctggtagtactcgctcagccagcagttgcgcaccgtctcgatatcctcggccagacggtagtcccacgggctgatctccatatcctcggcgtggctcatgaccgtgatgtccttttgggtgcagatggcaaatgcccgcgccatggtggcgttatcctgcacgccgtggccgtcctcggtgatgaacttcacactggcgggcagggtcttgaggtggtcgatgctcacaccgtcaaagttttcggtgatggagacggtctggtttgcatcgcacagccctacctcggcggctttctgttccaccatcacagcctgtgcggcagaagagcagacgggctttgtgttgggcatcaggtttacaaaggtgtagccgccggcggcagcggcgcggctgccggtctcgatgtcctccttgtactcaaagcccggggtgcgccagtggcagtgcaggtccacaaatgcgggcagcaccgtcagcccaccagcatccaccaccgtctcgttctcggcggcaagggcggaaagatcctgccctacggcagcgatcttgccatcctttacatagatctcgagcggccgtccctcggtgttcacagcgtttgtcagcagcatcgcggttccctcctataatggtatttttgtgtatcaggcgcccgaaaacgggcaaaaaaaaacttttccccgcaaagggaaaagctcattgcgcaaaaaaaggaaacaacgaagccacggcaaaaccggacgcgaactgcttgttcagtttcgggttctgggcgctgcacagcatggtgtttctccttttcttgatggttgcgttttcattcgtattattttatcatagaaccgcaaaatgtgtcaatggctgcgcgcaaaaacaggtgctaaaaggtttatggcatctctcgccgaattttggatactctacccaaaacccgggccatgcggcaaaataaatgccattttgttccacaatccctagcgcagcactgtactttcgttgcctgctgtgctattataatacggtaaaagggagagccccgccgcgtgggcgggtgtttatgggaaagagaggttttccgcatgggtttacttgaggacgcgcggaacatccagcgcaaggaccccgccgcacgtagcgtactggaggtaatgctgctgtacccgggattccacattctggtgtaccaccgcattgcgcactggctgtacgggcacaagcacttttttctggcacggtgggtcagccagcatggccgccaccgcaccggcatcgagatccacccgggtgccaccatcggcaagtgtctgttcatcgaccacggcatgggcatcgtgttcggcgagacctgcgagatcggagacaactgcaccatctaccacggggtaacgctgggcggtaccggcaaggatactggcaagcgccaccccaccttgggcaacaacgtgctcatcggcgctggcaccaaggtgctgggtccggtgttcatcggagataacgcccgcatcggcgcaggcagcgtggtgctgcgcaacctgcccgccaactgcaccgccgtgggcgtacccgccgaggtggtgcgcatcaacaacaaggcggtgaaccctgccgacgatctggatcagcaggatctgccggacatcgtctcgcagcggctcaccgatctggatcgccgcctgagccagctggaaaaaactgcgcagggcgatatcccgcccactgccgcacagatcgccgcccggcagcggaagtaacctatatttttgacaaaaacgacaccggacaggccatgacctgtccggtgtcgttttatcttattctttaacacccttccccggcacagagggactttaccttctgcacggcggcagacacaaggctgccgatgggctggtcgggcacgccgacaatgtagttctcgcagtggttcaccgggatcagcacccgggtggcgctgctctggcacaccgccgtggccatggcgggggtgatctcccccagcagcgcatctgcaataacgatgccgatgggccccacgatgatgtccgcattgcggcagttcaccaccacagcattttcacccgtggcagctcgctgtgccccggccttatgcatggcctgcgcggcgacactgttggtgcccacggccaccagccggatatccgggcactgggcgctgagggcagccaccagctggcgtcccagtcccccgccctgcccgtcaatgacaagcacgttcatgctgtacctcagaagtcgatctcttccagccgcagcagcgccagaatgtagatcttgacggcctccagcagcttgttgatgggagccgcctcgttggcaccgtgcatcgggccgccgaactccggcagctttacatcctcatgctccgggccgaagctgacggcataggggaagtggcgggcataggtgccgccgcccatggtaaagggggtggcgttctcaccagtcacctcgttgtaggtgtcgatgcaggcgcggatggcggggctgtcggctgcgatatagaaaggctcggctgcgtccacatcctccagctttgcgccctcgcccagcgcagcggtgacctgtgcggtcagcttttcgccattggtgcaggtggggaagcggctgtcgatggtctgcaccagcttgccgttctccatatagatgcggccgccgatgatggtcagcgggccaaaggggccgtcggcgcagtcgatgccaaggccggtgcctgcggtggagctgtgcagcttgtgcagtgcctccagataagcgcgctcggcgtcattgcacaggccgttgtccagcagataatccgctaccagaccaatggcgttcaccgtgccctccggcatggcggcgtggccggacttgccccagccgcgcacccgcacgccgtccccttccggttccagcgtgatgttgggagcgttcttcagcttgcggatatcggtcttgaccagagcgctggcgcggtccggcacagcgttgttggccacaccgccctcaaactctgcaatgacgccgttgcacaccgggctgacgatcttgccgccaaagtggcctttttcgccgttgcacaccgggaactcggcatccggggtaaagcagaacaccggggcggggtagttttccagatagtacttcacatcgttcatgtgggtctcctcgttgtcgcccacgatggcacggatggggtagcgcagctggtaaccctgctccttgaggaacttcagcgcatacagggtaacgatcatcgggcctttatcatccgcgacgccgcgtcccagcagccagccgtcctgaatgcgcatcttaaagggatctgccgtccagccgttgcccacgggcacaacgtccacatggcagatggtagccagatatttttcagggtctgcaccggccagttcggcatagccgatgtagttttcgcagttgcgggtggcaaagcccatgcctgctgccagctccagcgtcttgtccagcgctgcccgggggcctgcgccgaagggtgcgccctcctccggggtgccctccacgctgtcgatggcgaccagcgctgcaatgtcctgcagcagctgctctttgttttccgcaatgtatgcgtcaattttctgattcagtgcctgatccatgttctataacgtcctttctgaccgggagcagatccctgtctttacacaactgttacccagtttaacacactccgggcggaaaagctaccggcatttttcacgacaaaaatgtccgcgttttgtcagcccgccgcaaacagcccgctgagcgcgcccagcagaccggcgcttgccaagcccatgatgatgcccgccagcagcacgccgcccatgcaggcgatcagcacatccttgaacttcatatccagaatggaggctgccagcgtgcccgtccacgcgccggtgcccggcagcgggatgcccacgaacagcagcagcgccacggtcagacccttgcctgccttggcttccagtgcgcggccgcccttttcgcccttgttgatgcaaaagcggcagatggggccgatgaggggcttgtggtaaccccagatgaggaacttgcgggcaaacagatagatgaagggcaccgggagcatgttgcccagcacgcacaaaaggtaggtgggcagcaccggcagccccatacccagcccaatagggatggccccgcgcagttcgatgatgggcaccatggagataaagaagatcagaagataatttttcagcattggcttctccttatattacaggtcgatctgcagctccaccgggcaatggtcggagccaaagatctcgttgtggatctcggcggcgcggatgcggtctgcaatgcgccgggaaacgataaaatagtcgatgcgccagcccgcgttcttttcccgcgcgtggaagcggtagctccaccagctgtacttcacctcgtccgggtgcaccacccggaagctgtccgcaaaacccgccgccagcagctcggtcatcttggcgcgctcctgatcggtaaagcccgcgctcatgcggttggtcttggcgtttttaatgtccatctcggtgtgtgccacgttcagatcgccgcacaggatcaccggcttttgggcgtccagtgccagcaggtacgcgcggaaggcgtcctcccactccatgcggtagtccagccgcttcagcccgtcctgactgttgggggtgtagcagtttaccagataaaagccggggtattccagcgtcagcacccgtccctcgtggtcgtgctgttccagcccgatgccggtggtcactgccagcggtgcggttttgcaccagcaggccgtgccggagtagccctttttctctgccgagtaggtgtattcggtgtagccctccggcgcaaaatctgcctgtcccggctgcatcttggtctcctgcaccgagaagatgtccgcgtccagcgcggcaaagctctcggcaaagccgtgggtcaggcaggcgcgcaggccgttcacgttccagctgatcagtttcatgcttttctccttattgttatgcctgatattttgttttccatgcgccgctgcggaagcgcagcacaaagcaggtcacgcggcaggtccagtcgatgaccatagccacccacacgcccacagcgccccagcccatgcgaacgcacagcagatagctgaagcccagccgccagcacgccatgctgaggatggacaccaccatggtaaatttcacgtcgttggctgcgcgcagggcgttgggcagcacgaaggacagcggccagaagatgatggcgcagcccgcatggatggtgaccagtgtgatggccaattccatcgtctcgccggaaagggcgtagatgcccaccagctgccggaggaacagcaagatcgctccgttggaaagccccatggtgatgtaagcccacagcatcagcttgcgggtgtagtaaacggtctgctcgtggtcgccggcgccgatgcaccgccccaccaccgtgatcatggccagaccgatggccttgcccgggatgacgcccatgccgtccagattgtttgccacggcgttggctgcgatctgcactgtgccaaaggtggagatcatgctcaccaccagaatgcgcccggcctcgaacaggctgttctcaaaggccgagggaatgccgatgcccagaatgcgctttgccatgccgccgtccagccgcagggtcttgggcacggtaagcaccgcatcctcccggtagcacttgcgcaggatgagcgccgcagccaccacgcgggacaccacgctgggccacgctacgccgtccactcccattttgaagccgaagatgcacaccgcgttgcccacgatgttgatgatgttcatcagaaagctgatctgcatggagatcttggagttgccgatgctgcggaacagcgccgcgccgccgttatacagcgccagaaacgggtagctgagggcgatgatctgcaaatatttcacgcctgcgtccagcacgtcggtatcaatagagccgtagaacagccggatcatggggcgtgccaatacaaagcataccgcgccgatcaccgcaccggacaagccgctgagcagcagcaactgaccggcgcttttgtcggcatccggcctgtcctttgcgcccagatactggcttaccaccaccgcgccgccggtagccagcgccgcaaacagcacgatgataaggttgttgatcatatccaccagactgacgccggagattgccgcctcgccgcagcgggacaccatcatggtgtcggccatgcccaccgtcacttccagcagctgctccaccagcagcgggatggccagtaccagcagctccttttggctgaacagcggctcgcgcccgccggtcagtctgtttttttcattgccatgcagtagctttgtcattcgtttctcccctcccggcaccgggcacttttcccggtacgccgccgctgcccggcgcgtgcatttttccggttacagcagatgtgtccatcttaacacacccccggctgcttgtaaagcggtgcaggctatatcccacgaaaatcagctttccacgcctgcgttccattgcccgccggttttataaaggtatccctgtgcggtcttgcggctgttgttccgtttttatgcttgttcgtcagtttgccgggaactttccgtaaaatttgtgcgtttctacaaaaatgcgatttcccgcgtaatttcgggcaaaaattttaaaaaacctcttgcaatttttgttctgaagtggtatgttgtatccaacaaaagcgaaacttggatacatcttcactttggagcggcaaattcggctccgcacacgcctttgtttttcaccttgctattttcttcatttaccttcttatcatttaccctgcctgtcccgcaagggacgagaaaagcgatgacccacctgcacgggtcatcgctttttcttttatttataaagtccgcagcccggacggctttcccttccgtcccccatgggctgctctatccacaacgggtgccgcttgtgctgcggcagctcctctgcctcctgcttggtcttgtggtgcagcttcatgggcgcgagggtcaggtttttcagcaccgtggtggacttgcctgaaccggacggcccgatgatcaccagcttttcgccctcggcgacctcaagattgacgtctttcagaacgtgcagagcgcaccggaatgcaggctgttctcgctttcccatcagacccggtctgcttatttttttcggtactcccgcggggtcatgccaaaatgcgccttgaacgcccgattaaaataggaaaggttttcaaacccgcaccgggaggcgatggtcagcacagtctcgtccgtggtctgcagcacctcggcggcggtgttcagccggtactcattcagaaaggagataaagctctgcccggtcatctgccggaaccagcgcataaaatggctggcgctgaaggagcagaccccggcagcatccgccacccggagcggctcggcataatgtgccgaaagccattgcagcaccgttttcagccgctgggtgtcggcagtttcggtggggagacactgcctgccctgcgcaatgagcagggcaagaaagcgcagcagcgccccttttaccagcagctcgtagccggggcgcttggcgcggttggcatcttccagctcccgcaggcaggcggcggcttgcagatagcacaaatcgttcggagtcagacgcaccggcagcgacagccgcccgctttgcagcggcagcagatacttttcggcgcaaagatcctccgcgccgcccagcagctccggttcaaagatgatattttcgtattccatgcgctctccctctgcctgccgcagcgcatggagcgtgcccggggcaaaaaggaagatatccccccggtaggccgggtaggtcacagcgcccacctgcaccagccctgtgccctgcttgacaaagaccagctccatgctctcgtgccagtggagtgccacctgctgaaaatcccccggaatggtgcaggggtacaaattgaacggaaaccgcactgcaccgtgctgttttgtctcctgcaaagatgcctgattttgcatcgtctcaccccctgatgataggattgtaccatagtttgcactgtttaggcaagattttgaaggttctatgtggtatatcttgaagtacagatgtcaaatctgttttccgtaaggtgtatctgaaaacagagaaacagactgaattttcgacttttcagatacaccctagcaaaggaggatgcttttatgagctttaccgaaacgttacagagtattaccggcaagctgctggcagactgcaccgaccaagagctgtatctggcactgctggaacttgtgcggcagaagagcgccgaccgcgtgcagccggtcaccgggcgcaagctgtactatatcagtgccgaattccttattggcaagctgctgtccaacaacctcatcaatctggggctgtacgacgaagcccggtctgcgctggctgctgccggaaagcgcctttccgacattgaagaggtagagccggagccttctctgggcaatggcggtctgggacgtctggctgcctgcttcctcgactctctggcaacgctgaacctgcccggcgatggcgtaggtctgcggtaccacttcggtctgttccatcagtcctttgaggacggcgtgcagaacgaaaagcccgacccgtggctgactgcccacagctgggcggaaaagaccgacaccacctacccggtggaactggcgggcaaggagtacaccgcccggctgtacaagctggcggtcaccggctacgagggacgcaccaacaccctgaacctgttcgatctggacaccattgacgagagcatcgtccatgacggcattgccttcgataagaccgctatcgacaagaatctgaccctcttcctctacccggacgattccgatgaagccggccgccgtctgcgggtataccagcagtacctgatggtctctgccggtgcacagctcattctggccgagtgcgccgcccggggctgcaactaccatgatctggcagactacgccgccatccagatcaacgacacccaccccagcatggtcatcccggagctgatccgcctgctgggcgcgcgcggcattgagttcgaggaagcggtggagatcgttaccaagacctgcgcctacaccaaccacaccattctggccgaagcactggaaaagtggccgcgcacctatctggacgccgtggtgccgcagctgatgcccatcatcgaaaagctggatgcactggcacgcacccgcaccgaggacgagagccttgccatcatcgacaaggacaaccgggtgcacatggcacacatggacatccacttcacccactccaccaacggcgtagcggcgctgcacaccgagatcttgaaaaattccgagctgcacggcttctacgagctgtacccggaaaagttcaacaataagaccaacggcatcaccttccgccgctggctgctggagtgcgacccgcgcctgaccgccacgctggaaaagcacattggctccggcttccgcaaggacgccgccgagctggaaaaactgctggcctttgccgaggacgagacggtgctcagcgagctgaccgccgtgaaaaaggccaacaaggaagcactggccgactggctgctgcacacccagaaggtgactgtgaacaccgatgccgtgttcgatatccagtccaagcgcctgcacgagtataagcgccagcagctcaacctgctgtacctcatccatcagtactacgagatcaaggccgggcacctgcccgccgctccgctggtgagcatcttcggtgcaaaagccgcgcccgcctacaccattgcaaaagacatcatccatgcgctgctgaccctctccaaggtcatcgccgcagacccggaggtgtccaagtggctgcaggtggtgtttgtggaaaactacaacgtcaccgccgccgaaaagctgatcccggcctgcgacctttctgagcagatcagccttgcctccaaggaagcttccggcaccggcaacatgaaattcatgctgaacggcgcgctgacgctgggcaccatggacggtgccaacgtggagatcagccagcaggtgggcgaagagaacatctacatcttcggtcagacctccgatcaggtcatccaccgctacgccgtgggcgattacgaccccgcccagtgggtggagggcgatgccaacatccgccgcgccatcagcttcctcaccgggccggagatgctggccgccggtcatgccgaaaacctgacccgcctgcacgacgagctgatccataaagactggttccagaccctgccggacttcaacgcctacgttgtgcgcaagggacaggccctcagcgattacgcctgcgaccccatgggctggcggcgcaagtgtctggtgaacattgccaaggcgggtatgttctcctctgaccgcaccattgccgagtacgaccgcgacatctggcatctgggcaaataatcttttttatcgcaagacaagaaattagcgcaacattcaaacagcatatttgcgataaaaaattgaattgctataagcccctgcgcaaagaaaaacaggaaccggcacacattgcatttggtgcaccggttcctgttttatttcttatcatgcaagatggaacagatcgatcagcacgaccatggcaaggccatagtagaccacaaccgccaccagatcgttgatcgtggtgatcagcgggccggaagcaaccgccgggtcgatatggatcttgtggaacagcatcgggatcagcgtgcccaccagactggaaatgaccatggacacgatcagcgacagcccgacgcagccggacagcaaaaacgccgaggtccagacatagcccttgaaaaagtggatgtagcagcccagaaaacccaaggccatcacggccagaattgcaccgttcaacagacccacgcgggtctccttccagagcagctgcagctttttggaaagggtcaggttttcatccaccagcacacggatggtcactgccagcgactgggtgccaacgttgccggccatatccagcaccatggactggaagcagatgaccaccggcagcaccgccaccactgattcaaacgcgccgacgaccgaggagaccagcatcccgaggaacagcaaagcgatcagccacgggagacgctttttcacgctttcaaaaacgctttcgttcagatcctcctcgccggtcagaccgcccagctttgcgtaatcatcgcccatctcatcatcgaccagctcgaccacatcggacgatgtgatgatgcccaccagcttgccggcatcgttcagcaccggcaggctgcgctccgcgtagtccacgatgcggtcgatacaatcgctgatctgctcccggtctgtgacgtagggataagagcggacgatcaggctttccagtctttcctctgcacgtgcaatgatgaggtctttcaggtcgattgcaccatagaagtgctcgttttcgtccaccacatacagcgtggagatgttatcgttttctccggcctgtttcaccagctcgctcatcgcctgccggatggtcatatcgtttttgatggagatgtagttggtggtcatcctgctgccgatctcatcctcgtcatacgagagcagcatcttcacatcttcaaccgagtctttgtccagcttgttaacgatctcgttcttatcggtatcgtcaaggtcttccagcgcgtccaccgcatcgtccgagtccatgttggaaatgacctttgcagcttcatggctgggcagctctttcaggtacggctcggcatcgtccagataagtaaagatctcggcaacagtatccacgcccagaatggaatagagcgattgacgttcggcgggggtcagtgactccaacgcatccgccagatccttttcatggtaatcagacagtttttcggccagctctgccttgggcagaccgctgtgaatgatgctcagaatttcctgcacataattcttctgcatggtagttcctcctgattccgcgagcttgacaaatcaaaattcatcgctccgcttgaaattttgcacttcatcatagcacatccggtatgctgcggcaaccctgccagcgtgaattttttgtaaaatatcggtacaattcaacacacttctttttgtgctcataactatatcgcataaaaataccccaatactgggtgtccagtattgggggtacatatcaaagccactgcctttctctttttattttcattaccgcccacggccaccgccgccgccgtggaagctgccgccgcccatgcccccgaaggagccgccgccgccaaagctgccgccgccgaaaccaccgcgcccggcaccgcccccgaaggagccgccgcccatgccgccaaagccgccgccgcgcggaggccggggcccgccgaagcaccacagccagccgcaggggctggcaaaaacataggccaccgaccggatgatgacgatgagcagcacaacgctgaccacaagggtcaagatgtcggtcagggtgctgccgccgctgctctggctgccctgatgcccgggctgcacggtgctgccgttgccggcgctgccggaaaggctgaccccgtaaatatctgcgatggtgtttgccacattccgggcacaggtggtcactgcgccgtcataatcctttgcggcaaactgatcttccatggtctgggcaatggcgctggcctgcttttccaaggtagtgttgcggaagccgtcacctgtggcaatatagtaatcgccgtcggcgtactgctgggtctccattaccaacaggatcagcacaccatttttgccggtagaagaaccaatgccccaggcattggccgcctgcacagcgtaatcctctgtggaatcattgcctgtgtattctactgtcagtacaccgatctgtgcgccgctgcagctggattccagctgggcgttcagttcggtgatggtctgcacggtgctgctgctcagcacaccggcatcgtccaccacacactcgcccttgggcaggctgggcagctgggcggcaaaggccgccgggcacagcaccgccgcgctgaccaccacggccagcaccagtgcgctgatgcgttttgcaaagtttttcatgcgaagggttcaacctccttcacgccggacaaagctcccagtacactggccggaaagccgccgacatccttctgatattcatacaccgccgtattgtactgcaaggtgccgatgatggtggctgcactgttgaactggccgtactgcccctgcaccgcgcccatcttcatggggtctgcggcctgctcctgcaactttgcatacagctggtcgatggcagtgcccagcgcctggtcggcctgatacagcgcgtgcatcgtgctgccctgatagtagggcagcgaggtcagcgactggcttttgccgccgttctgcaccgcttgcagacaagcggaaaaatcgttcagcgccgtctgtgcggccagcacctcggcgctgtctgcgccaagggtattggatgcggtggtgaggatatttgcggccgtgttctcccgggtggtcagttcctcgctcaggttatagccgttgtcggcggcgacccctgcggtgaaccactggtgggcggtgttgtacttgccgcgcagcttggcgctgccaaagccaaagaaagccgccagcatcaccactacgctcagtgccagcgccgccgcccgggtggaaagcgcagcgggcagctttgcttccagtgcggccagcttctgctggcggggcgtcagccttacggtctgctccggttttgccttttcgcggtagctgcccgcgtcaaagccgccgggagcggtttgtttgttctgagaaaaatcagcgtttgccatttcagctccggatctccatcattttggttttcaactcgtcctcgatgcgggtcagttcctgctcggcggcaacgcgctttgcgcggccctcgctctggatcttgttcagctcgtccagcgtctcgatcaggctcttattggtctgctgcaaggtctcgatatccacgatgccgcgctggctctccttggcggtctcgatggtgcccatcttcagcgcctcggcgttcttcttcagcaggtcgttggtcatgttggtcacggcgcgctcggcctgcatggcctgctggctgtgtgccagacccagtgccagcaccatctggttcttccacagcgggatggtgttcacgatggtggactggatcttttccgccatcatggtgttgttgttttgcagcagacggatctgggggcccatctgcaggctgatattgcgggtcagttccagatcatacagctttttctcaaaacgctcgcactggtcggcaaggtcgcgggcagcctgtgcgtcctccggcaggccggagaccttggccttgtccatggcctgctgcaattcgttggcacgcacgtcggccagctttttcttgccggcaaggatatacatactcagctccttgaagtaggccatattcagctcgtacatcttgtccagcatggcgatatccttgagcagctgcacctgatgggcttccagcatggactggatcttttccacgttggtctcggtcttgtcgtacttggtcttgagggcatccagctggctggttttcttcttgaagaagcccataatgcccttctgctgttcctcgttggcgtcaaaactcttcagctcgccgatgaggtcggtgatcatatcgcccacctcgcccagatccttggtggacaccttggagagggcagcctcggagaaatcgccgatcttcttctggcaggcagagccgtactgcagcacctgctggctgttggtgatgtcgatcttctgggcaaactgatccaccatggcctgctcctcgggggtcaggttcacctgtgcttccggggcaggagcagcggcgggcttttcctcctgcggcacagcggcgggggtggggtccagcgtcagggtgggcactgcgggggcatccagatcaaagttcagggtattgtcagccataagtgattccttcctttcaaaatcccaaggggatattctgattttacttgctcagaccctgccctttcagcatattctgcaaaacggtcaggtctgcggacagatccatgctctctgccgcgtacagggcatccagctggttttcaaaagccgtggcaatggaggcggcgttgtgctccacctcggcgcggatggcggtggcgttctcgccccgcacaccctgctttgcaagctttgcatactgctgcaaaatgtttacggcgtccggcagatagtagttggcaaaccggcgcacctgctttgccttggcggggtttgcttccacggtttccacgatggagcgtcctgccttttccatgcgggtcatagcggcagacagctgcgggtcgggcaaagtctcgttcagcgcgtgcagggtgtccagcttctgctggatatcggtcagcatctggtccacatcctccacaccggtgtggaaaggcacctcgtgctccaccacccggggcgggcaggtcttttgtgccacgccaaaagccacagcggcaccgcccagcgccaccagcagcgcccataatttgtataccggcagcactgcgcacagcaccacgaacaccagcgccatggcgtaaaaaggcagcacgctgggcttttgggtgcggatgatcttgctcatggtcatttctccttgtccggggcagtgcgccccttatgatatccataatacaacgtccgcaaaaaaacgcaagtatcccgcaaaagaatttacagccttgtcatcattttacgatccagtccaccagcgcagcgccccaaagctcctccagccgggcggggctgcaggcggcgttggcgggacttgtacttggcagacggacagccgggatgccggtaagcggctgctgatattttgtgtagatacggtaggctgtggcaccgttgcagaacaccgcccggatgggcgctttgcgcagcagcccggcgatatcgttgggcaccacatcccggatggaggcatccgatgccccggtgatggtgcagctttccagcgtatcccacagcgccagcccgtggcgcaaaagcagctgttttttggcggcgatatcctcccgcacgggcagcggctccccggtcagcgccgccagcagcggccagaaccggttttgcgggtggccgtagtaaaaggccatctcccggcttttggggctgggccatgtgcctaaaatcagcgcccggctgtggtcatcgtacaccggtgcaaaactcataagctgccgcctgcactttcaatatttccccatgcagagccaaagtccttgccggagggctccgcacgggggccgtcgaaccacagctcctcgatcagcgctgccacgccgtcctcccgcacgtccccgatgatccggtcggcagcggccttggcgtccggggtgccgtttgccatgcaggcactcaggcccgcagctttcagcatccccacatcgttggcagaatcgcccacagccacagcatccgccagcgtaagccccatctgtgcacacaggtcggcaagccctacgcccttatccatgccgccgcgcacgatatcgtagtagcagtaaccgtctgcgttctgcgcgcccgtctgcatccagtgcaggccaaggtagccgtatttttcgtggaagcgctccacttcctgcggcggcatggcggcaaaggcagcgtggggcatatccaccagatgcctgtcctgatcctcgccgtccacgcagtccagcccggggctgttcatcatctgatagccggtgtgcagatactcgtactcgcagtaggcgtaataggcatcccggaagttgaattgcagcgggtagttataatcctcgcaaaaatccaccagcacatacatctcctcgctggtaagcggatgctcggctatcacgttgccctgcctgtccaccacgcaggcaccgttgcaggtaatggcgtagtcgtaccggatgccgcccagctggttcttatcccggatgccggggtaggagcggccggtgctgagcacgaacttgcccccggcagcctgcagctttttaccgcctttaccaccgccgggcggggctttgcttcgccaaaaggcatcagcgtgttgtcgtaatcgcttgccagaatcttatattgcatggtcatctctcctgtgtgcatcgttttctcccagtataacacatttcaaagtccagcgggagagggggaatattaaaaatgccctccgcttgcgctctgggcaaatatagcggaaacttcttttgatatagggcgtttgtcgcgctctgcggagcgctccaaacgcatttttcacggaaagggtcgtaaagacaagatacagcctttcccgcagcgccgcgctttcgcagaaagcggcgctgcaaatgccgttttcctccacgaccccacctgtgaaaaaggggttcagaaacgcccgcaggcgtttctgaaccccaaaattaaaaataatatttccttagcttatgcgcaaagcaaacgcggcgcgcatttcaaatcgttttcttcacgggaaatcaggcaaacaccgccacgaccacctgcatggctacgcccacaaaggcaccggcaacccatgtcaggccggtgataaagaggttctgcttccacgaggggttggcgcgccacagcacagccagacccacacccgcaccggtgcacagccccgccacaaggctggaaaagcgcagcgcaccctccacatacagctgggtcagcagcacgctggcggcgcagttggggatcagccccaccagagccgccaccaccggctggaagaagcccatgccgcccagcacctcagcgaatacatcctcgcccacgccctctacgatcatgccaaacaccagaccgaaggcgaagatgaacacaaagatctccagcgtgtggcgcagcgccgcctgccagatgggcttttcgttgccctcggcatcgctgtgctcctcgtggcagtccacctcgtccgcatggccggtgtagccgccccgcagccccttgggcagcacgccccgcagcacaaaatccagcacaaagcccaccgcgatggcgtacagcaccttgatgaccatcagaacagccagcttatcccagtaggcgggcatggacaccagcagcgggatagcttcgtcactggtggcaaggtacaccgccatcagcgtgcccagcgtgatgacccgggaggcgtagaagttggacgcaatggcggagaatccgcactgcggcacacagcccagtaccgcgcccggcacagcaccccagcgcccgccgcctgccagcagcgtctcgatgcgctcaccgtggcggtgctcgatatactcgatcagcaggtaggccagaaacagaaagggcagcatcttggcggtatccaccaaggtttcgcccagaacatccagaaacagttccataaataatcgctccaaagacccgcagggggtcgtctctcaataatttgcaatcagtttgcattttcgtgcagggaagattatacacgatatgcttcccaattgcaataccaaattgcaaattggttgcaattttatgttatggaacgttgctgcgtgcaaaaaagcgtgacttcgaatgatctccgcgtcttacgggttgcggcaccctacatttgcagcgttgctgccgggacagctttctgcctacctttagcgtgcaaaaacgctccgctgggccagaggcagggaggggtgttccgagtcccccctccctacctctggactccacccaccccgcaacgggccaagggctgctcgcccttgacaatcctaaagcagaggtcgaagcacaaaaaagctagcgctgcgccagtcggcgctatcgctttaacgcttttttcgcttctccatctataacccctcagtcgctgcgcgacagattcccctttttgtcacctgcggtgacatcttcccccggccgggggaagtcggccctctcgggggagcgagcgcccgcccgcagcgccgcgctttcgcagaaagcggcgctgcaaatgccgtttttctccacgactccacctgtgaaaatggggttcagaaacgcccgcaggcgtttctgaaccccgaaataaaaaatactatttccttagcttatgcgcagagcaacgcggagcgcattccaaatcgtcccacgcagcaaggaagctgcggtcggttttaccccttcagcggtacaaagcccacaaggtctttgacgacctcgccgccgatgatcagaccggctaccgaaggcacaaaggcgttggagcccggcactgcgcggcgcacagtgcacttgcgctgggtacccgggggacagatgcagtggttcttgcagctgatggagtcgtcctcgatgggggtcatggcaggctccttggagtagaccaccttcagatgcttgatcttgcgcttgcggcactcggtgcgcatcacctttgccagcgggcagaccgaggtcttgtagatgtcggtcacctcaaagcgggtgggatccatcttgttgcctgcgcccatggagcagatgatgggggtgcccgcttccttgcacttcatcaccagtgccagcttgccggtaacggtgtcgatggcgtccaccacatagtcgtactgggtaaaatcgaagtcgtcctgcgtctccgggccaaagaagcaccggtgggtggtcaccttgatgttggggtcgatgtcgtggatgcgctgttctgccacatctaccttatactgccctaccgtgctgcgggtggcgatgatctgacggttgaggttggtcaggcagaccttatcatcgtcgatcagatccagtgcgcccacgccgctgcgtgccagcgcctccaccgtgtagccgcccacgccgccgatgccaaacactgccacccgggcgtggtgcagcttttccatagcctctgcacccagcagcagctgggtgcgggaatactgatcctgcattttgttctccttacttttctacgcgggtgatggtgccgccgcccagcaccacatcgccctgatacagcacggcagcctgccccggggtgggggcacgctggggctggtcaaattccaaccggaaaccgttttctgcggggtaaacggtggcctgctgctcggcctgatgataccgggtgcgggcggtaacccgcagcggctcggtcagcgccggaatggcgatccagttcacatcctctgcgtagacgatgcggtcaaacagttcgctctccggcccgacggtgacggtattggcctgcatatccttgccgcagacgtacaccggtgcgcccagcgcaagaccaagccccttgcgctgtcccagcgtgtagcgcaccgcgccgctgtgggtgcccaccaccttgccgctctgatccagaaaatccccggcggggtagtgcttgccggtgaactgctccataaagcgggcatagtcgccgtccggcacaaagcagatatcctgactgtcgtgcttctgggcgttgataaagctgtgctcctgcgcgatctttcgcacctcggtcttgtgcagcgcacccagcggcagacggatatgcgccagctgctcctgcgtaaggttatacagcacatagctttgatccttgccctcgtccaagccctttttcagcagccagcggccggtttctgcgtcctgctccacccgggcgtagtggccggtgaccacatactccatgccgtgttcctctgcccagtccagcaggtggcggaacttcatatatttattgcagtcgatgcaggggttgggggtgccgcccgtctcgtagacgcggatgaatttttcaatgatctgcgcgcggaagtcggcggtgaaatccagcacctgatacggcatatccagcgcaaaagccacctcggcggcatcctcgatatctttctccgagcagcaggtctggtaaccggactgtcccagcgtttcgttgtgggtaagccgcatggtgatgccggtgcagtcgtagcctgcctgctgcatcagacaggccgccaccgagctatccacgccgccgctcatggcaatgagggcgcggggacggtttgcagggttctgagtggtcatagattctccttttatgggttcaacatactaaagcagtagtataatactaccgcagcataaaccgcttgtcaagacgctataattttctgcgccgcagccagcagcgccggtttttcgttgggatattctgcacgtatcacgccgtccagcagcgcttccagcacccggcgcagcgcaggccctgccgggatgcccgccgccatcaggtcgcggccgttcaccgccagctggctcacccggcagcatacgccatcggcatccagctgccgcgcccgctgcgctgcaagggcgcaatccggggcattctgcgggtgcagcgccgcgcacagcgcacacagccgctccacggtgcacagcccgtaccggcctaaaagctgccgaaggtggatatcaccggggtgtgcagaagctttctcctcggacacaccctcccccgccgtttcccgcactaataccgcggtctcctcgatgcaggcgttggagcagcgcagccgtttgagcacccggcgggtgtcggtctcgcccagagcgcccagcagcgcggcccagcgcaccggcagattttcctcccccgccgggcaggcatccagcaccggctttgcggcttcaagtgccgccggggtcagctccggcagtaccaccgccagcactgcgggttccagatacgcccccggctgcggggcggtcagcagctttgccagctcctcctgaatgcgctcggcagagatgcagtccagatggggtgccagctgccgcgccgcccgggcggtggcagcgtccaacgcaaagccgaaccttgcggcaaagcggtacagccgcagaatgcgcagcgcatcctcggtgaaccgctgctgcggctcgcctaccgcccgcagcagaccgttttgcaggtctttttgcccgccaaaggggtctaccagcccctcggcttcattataagccatggcgttgatggtaaaatcccgccgggcaagatcctcccgcacgtccggtacgaactgcaccgcgtccgggtgacggccatcggtatagctgccctcggtgcggaaggtagtggtctcgtacagctgcccgccgtatttgatggtgaccgtgccatgctgcaacccggtggggatgcactgctctgccccgaacagctccatcacctgctgcggcagggcgctggtgcacaggtcccagtcgtgggcggtgcgccccaaaaggctatcccgcacgcagccgcccacggcgtaggctgcgtagcccgctgcgtgcagggcgtccagcagggcagctgccccggggtcaagtgtcagcttcattcctcgttctcctcgtaatgcagggtgatgcgtttgccgtcaaagccgcattctgccgcagggaatacgctttgtgcctgtgcaagctgctgttccgggtcggtgatcatgggggaatagtgcaccagccacagccgctttgccccggcttttgccgccagcgccgcgctctgtccaaaggtgctgtgcccccactgcgcggcctgctcctgctgctccggcaaagcataggtggcatcgcagagcagcaggtctgcgccctgcgccgcctgttccagcgccgggcagggcgcactgtcgccggaaaagacgaaccgcagccccttgcggggcgcgcccagcacctcggcgggctgcaccatacgctctgccagcggcacagcctgtccccgctgcaaaagccgccactgggtcaccggtacgcccagtgcccgcgccttttccgggtcgaacctgcccgcccggggcaagtccagccggtagcccagactgcgtacccggtgctttgttgccaccggcagcagcgctgccccggccggccacccatccgaaagagcatccagcgccaccggctgcccggcgcggcagacaagcggctttaccacatagggcagcgacccggtcagggcatacaccgcccgccagacctccaaaagcccctccggccccagcagcaccagcgggcgggtgcgtccctgcgccccaagggtctgcaaaagcccgggcaggccaaagatatggtccccgtggtagtgggtcaggcagatggcgtccgcacgcatcaggttcaccccggcgcggcgggcggcggtctgggtgccctcgccgcagtccagcagcaggctgtgcccgccgcactctgccacagcggcggtcagggcgcgctccggcagcggcatggtggcagccgtgcccagcagtgtaatggtcagcataagcagttcctccgtggttcttccctgttatcttaccacaaaccccgccggtgcacaattctttctgctgcgtcataagctgggcagagccttgaaaaaggagggcacagcctatgcagcgcgaccgcagaaaacgacattcccccgcccggcacccggtgcttttgcgccgggtgctgctggtgctgtgcattctggcggtgctgtggctggggtacagctgcatgatgccgcagctgcttttttctgcccggggcaccatgatctttgtgccggacccgccgctccggcggtaaacggaaaacacattccttcagcaccgcgccatccccccgccgcacaagtccatacttgaagaaaaacgcaaaatagtgtattatatagtattatgagtataaggggcacgctgtgtgccctgacagggggaacctatatggctgataaaaactttctgacagatatcatcgatgccgaccttgccgagggcaaggtgcagcagatccacacccgcttcccgccggagcccaacggctatctgcacatcggcagcgccaaggccatctatatcaactggtccattgccaaccagtacggcggcaaattcaacctgcgtctggacgacaccaaccccgcccgcgaaggcgaggagtatgtcaacagcatcatcgaggatctgcactggctgggtgccgaccccaacggcggcatcttctacggcagcgattactttgataagtgctatgagtacgccgagaagctgatcaccgagggcaaagcctatgtggacgacctgacccgcgaggagatgcgcgagtaccgcggctccgatgccggcaagccctcccgcccgtccccgtggcgcgaccgcagcccggaagagaaccttgacctgttccgccggatgcgtgccggtgagttcaaggaaggcgaaaagaccctgcgcgccaagatcgatctggcaagccccaacatgaatatgcgcgacccggccatctaccgcatcaagtacgccgagcatcaccgtcagggcagcaagtggtgcatctaccccatgtacgacttcgcccaccccattcaggacgccatcgagggtatcacccacagtatgtgcagtctggagttcgagaaccatcgcccgctgtacaactgggtcattgagaacatcttcggtgccgagttccccaagcagcgcgagttcgcccgcctgaacatgaccaacacggtcatgagcaagcgctacctgcgcgagctggtggagatgggcatcgtggacggctgggacgatccccgtatgcccaccctgtgcggtctgcgccgccgcggctacacccccacctccatcttcactttcgtgcgggaggccggtatctccaagtctgacaacctgatcgatatgcgccagctggaagcctgcatccgcagcgagctggacctgaccgcacagcgccgcattgccgtgctggagccggtcaagctggtggtggacaactaccccgccgacaagaccgagtactttgacgtagccaacaaccccaaccgtgaagccaacgataccaccacccgcaaggtcgcctttacccgtgagctgtggatcgacgccgaggactttgccgaggtgccgcctcccaagttcaagcgcctgaccgtggacggtgaggtgcgtctgatgggtgcttatatcgtcaagtgcaccggcgtggacaagaacgccgacggccgcattgccgccatccactgcaccgccgacctcgagaccggcaacggcaaccccgccgacggccgcaaggtcaagggcaccatccactgggtaagcgctgcgcactgcgtggacgccgaggtgcgtctgtacgacaagctgttcaccgaagccaacatgaacggcatccccgagggcagcgattacaaagactacctgaacccggaaagcgttaccgtacgcaccggctgcaagctggaagagagcctgaaggacgcaaagcccggcgaaaagttccagttcgtgcgcaccggcttctttaccccggacagtaagaaccccggcgtgtacaaccgtgtggtcaccctgcgtgacagcttcaagcccgcaaaataatcacccgcaaggagaagataccataccatgaccgcaaaaatgacccgtaatatcctgctcatgctggtggccaccgtgctgatgggcattgtgctgaacctgtatatccacaacaccggcaccgtacccgctgccgacaacgccgctcccctgaccgacggcagctacacctctgctgcacagggctgcatgggcgaggtgactgtcacagtcaccgtgaccggcggcaaggtgaccgccgtgcaggtggacgcttctgccgagactccggagctgggcggcaaagccgctgagacactggctgcgcagctgacacagaccggctccaccgccggtgcagacgctattaccggtgctaccctgaccagcgaggccatctttaccgccatggacgcctgccttgcgcaggcgcagtgatgctgtaaaccacagaaacaaaaactgccgcacagttgtgcggcagttttttgttttacagtgtgctttgcagccgtgcgccgctggcgtactgggtgcggcggtccatctggttatccagcggctgaccggcggcatagcgcctgaggttgtgcgcaaagatatccacgatgttgtccagcgtcttgggcaggctgaagccgccggtgacatggggcgtgatgatcacgttgggctctgcccacaagggatgctccggcggcagcggctcggggtcggtcacatccagccctgcaccggagagctgcccgctgtgcaccgccgccgccagtgcctcgccgtccacggcagtgccccgtcccacattgagcaggatggcaccgggcttgcagagcgccatccgcccggcgttgaacagatgccgtgtctccggcgtgtcaggcaggctcagcgccacaaggtcggcctgcggcagctctgcgtccagttcgctctgcgccaccacacgggtgcagtagtccgggcaggtggtgtccgggtgcacggtgcggcgcacacccaccacctcggctcccagcgcatgagcccgtcgggcaaagttagagccgatatcgcccatgcccacgcacagcacccggctgcccgcgatgctgcccacagagtggccggtgggtgcccagcggtgctcccgctggttatcccggtaggtgggcagctccttgagcaggctgagccacagcgccagcatacactcgctgatggccagcccgtaagcgccggtggcgttggtcacgatgcagccctccggcagcacccccggctccagatagttattagggccggctgcgttggactggaaccacttcagatgatcgttctgccggatcagcggcaccggcaggttgcccagcaccgcatcggcccacaaagcatcctctgccgtggcggtgtccggggtggtaaaacggtattcaaagccctgcaccgtctcaatgcgggctctctgctctgcactgatgggcaggcagacaaggatatgtttagacataatagggtctccttccctctttttgtctatcataccgcaaactgcgcggcggtacaaggggcggttctgtactttcaggcgcatcccgtaaaagaacaacgccgggcaacccgaaagctgcccggcaccgcattatctttcagtccagcgcgcggatagcgtccaccgtgcgcttgtactgctctgccacctttgcaaactgctcctgtgtaccctccagctgtcctgcacgcagggtctcggtcagggtataggtgggcgcgtataggttggagaagcccagattctggcagacgcccttgagggtatgcgccccgcggaacgcctcttttacatctcccctgcgcagtgcttcctccaaaatctgaaagctgtcgtcctgcaaaaacatccgcacaaatttgcagatcatggcctcgttatacagccgccccagcacctcctgatagtccgcacccatttttttatagcattcctgtatcgtcatagcttacgccgtgcctttctctttcagctgtcgtttactttcccaccgccgcatttcacggtgatacagtgctatgatagcacctttccacctttcttgcaactatagtgcaacaaattatgtgatttatataatttttgccttctcttttcggcagttgcaccaaagcagcgccctgttcccgtaaaaaccacctgtcatcgcatcctttcctgcctttgtcggatgctgtttgaatttactgaaaaaaagtaaaaaagacagttgacaaatcccccttctcatgctaaaataaacaagtcgtccggcgtagggacgtgcaacaaatgaatatgggcgtgttcccgagtggccaatggggacagactgtaaatctgctgctttcagcttcggtggttcgaatccacccgcgcccaccaagaactccagtatccgaaccgggtactggagtttctgttttccccggcctttccctctcccgcaaaaaacacttgcatttccggcacgtcgtgttatgatacaaatcagaaaaagtcgtataaagtcatcaggcgatattgaaatggaaagaaggcgctgcacccatgtatgtggactgggaatactacaagatcttttactatgtggcaaaataccagaactttacccgcgcggcgcgggtgctgggcaataaccagcccaacatcacccacgccatgaaccggctggaaagccagctgaactgcgtgctgttcatccgctccaaccggggcgtcaccttaacgccggagggggagctgctgtactcccgcattgcatcggcggcggtacagatccaagatgcagaagaagagctgagcgccagcgccacgctggagcacggtgccatcagtatcagcgccaccgagaccgctttgaacatctacctgtccgaaaagctgcgcgccttccataccgagtacccgggcatccggctgcgcatctccaaccactccaccccgcaggcggtgcaggcagtgcgcaacggcgaggtagattttgccatcataaccacccccgcagaggtggaaaacgggctgaaaatggtggagctgatgcccttttacgaagttcttgtgggcggcaggacctttacggcgctggccagccagactttgagcctgaaagagctggccggttatcccctgatctgtctgaacgaagagagcatgacccgcagcttttaccggcagttctttctggagcacgacgcggtgctgaaaccggacaccgaagccgccaccaccgaccagatgctcacgctggtcaaaagcgagctgggactggcctttatgccggagcctatggcagcgcccctgctggcaagcggggagctggtgcagctgcacttgcaggagatcatcccctcccgctccatctgccttgtctacgaccatcaccgcccgctgaacactgccgcccgcaagttccagcagctgctgaccaaagccggtgcacggggtacagcgcacaaataataccaatacagcaaggggctgctgcaaacgatcagcatcctcgccctctcagtcaaagcctgtcggctttgccagctcccccaaagtgggagcccttggcagtccacgcagacttcatctctttgccaaagcctctccctttgggagaggtggatgcgaacaaagtgagcagacggagagggcgagcacgctaaaagtgtttgcagcagccccttttctcttatttttttacgctctgcttcagctcccgctgttcttcctgcagttcctgcttcagggtgcggtcgatctcccgcgtctcctgccggatggcggtcagatccttttcgatgaccgggttttcctccagttcctcccggatgaacatcagcgcaaagctgaccagcaaaaagcagcaggagatccagatggctctgccgcccagctgcgccgcgcttttactgcccagcccagcccccagcgcgaacagcaggatgatgccgaagtaccgcaccatccggtcctttgcgtggggctcgtgggtcttgcgccagatgcagaaggcttctacgccgctgcgcaggtctccgatgcacatggtgctggcaaaggcatagccgtccaccttgcggaaagcctgcacctgcatggcgcaggagaaggaaacgatggcgtttgccagcaggttctgcgattgcggcagaaagcccaccgcaaacagcagcagcacctcgcccagcaccaccagctgccgccagtgcagccgctgcattgcctgaaactgctcccgcattttttctgcgaccagcacccccagcgcaaaagcgcacaggggcaccagatagtgcagcaccttatcccaccggccatccatgatgttggcgctcagcagcacgatattgccggtctgggcattggcaaacaccttgccccggaacagataggtataggcgtcctgcaggccgccggacagcgaaaggaacactgccgtaagaaaggactcggacatttgcccgtgatgctttgttttcatacttttaccctcttttcgggctctattataatacattttacggcagtttctgatatcacttttacataccggccatgtttaccgccccaaaaggcgcaaaaagcgcgggtgcccttccctatttcaccgcaatctgttagaatagggaaagagaatctcgtacacaggaaggagtttttagtatgaagatcgcaattccctacgaaaacggtcaggtgttccagcacttcggccactccgcgcagttcaagctttacaccgccgaggagggccgcatcaccggtgctgaggtggtctctaccgatgggccggtgcactggtgggctttctggtgcgcagcggcgtgaacgtgctgctgtgcggcggcattggcggcggggcacagatggcgctggcacaggccggcatccgtctgtgcggcggcatcaccggtaatgctgacagcgctgcggcggcttatcttgccggcacactggtctttgaccccaacgcccgctgcacccaccacgatcacgaagagagccacagctgcggcgctcacgcctgccacgccggcaagggcggctgcaccggcagctgccactgagcaatacttttttatggcacagtcggatctgcgggtccggctgtgctctttttatgtgcagcatacaaaaaacatatcgtgactatatgcaggatactttttacacattctcttttctctcgtataataggcaaagcggtctgagaccgcacaagggaatttataaaagaaggttatgaagtattatgcttaccgctgttactggaatcaactggggcgatgagggcaagggccgcgtcatcgacctgttggctgaaaatgccgatgtcgtggcgcgctatcagggcggcgacaacgccggacacactgtggtgacggagcagggcaaatttatcctgaatctgctgccctccggcatcctgcacccggaagtgacctgtgtgctgggcgcaggcatggtcattgatctggatcacctgtcccgagagatcgatgccatcgaggagcgcggcgtgaaggtcgacccggaaaacctgaagctttccgataaagccaccatctctatgccgtggcacaaggtgcaggacgggctggaagaagatcgtcttgcccagaagggccgtgcgttcggttctacccgccggggcattgcctacgcctacagcgacaagtaccgcaaaaagaccctgcgtctgggcgaccttttgcatctggacgaagagcgcgtccagaaccgcctgcacgtgattttggaatccaaaaatctggagcttgcaggctgctaccatcaggagcccatgagctacgatgctctgctggagtggtgccggatgcaggctggacagtttgcacccttcatctgtgacgcgggtgcctttttgcagcaggcgcacgacagcggcaagcgcatcgtgctggaagcacagctgggcgcaatgcgggatatcgactacggcatcttcccgttcacttccagttccaacacgctggcagcatacgcgccgctgggtgcaggcatccccaactgcaggcttgaccatgtggtgggcgtgctgaaagcctattccacctgtgtgggtgcaggcccctttgcggcagaaaatgccatgggcgaagcttggaacgagcagctgcgcaaggccggcggcgagtacggcgctgccaccggacgtccccgccgggtaggtccctttgactgcgtggcaagccggtacggtctgtcctgtcagggtgcggacaagatcgccctgaccaagctggacgtgctgagcagcatgaaggagatcccggtcatcaccggttacaagctggacggcgttgaagtcccccgcttcgacccgctgtccgaccttgaccgggtgcagccggtggtcaccctgctgccgggctggaacaaggatatctccggctgcaagagctgggacgcgctgcccacggccgcaaagcagtatgtggagtttctggaaaagcagctgggtcacgagatccagttcgtttccaccggtgccgagcgcgagaagttcgtgctgaaaggagaatggctgtgagacactttattgaacccaacagcttttctctggctgagcagctggcactgctcgaccttgccgaccggatggaagctgaccccgcgccttacgcccacctgtgcgatggccgcattctggctaccctgttctacgagcccagcacccgcacccgcctttccttcgagtctgccatgctgcggctgggcggtaagacgctgggctttgcaggggcgcagctttccagcgcaagcaagggcgagacggtggccgacaccgcccgcgtggtaagcaactatgccgacatcattgccatgcgccaccccaaggagggtgcgccgctgcgcgcctcccagtgtgcccgcgtgccggtgatcaatgccggtgacggtggccacgcacatccctcccagaccatgatcgacctgatgaccatccgccagcgcaaggggcggctggatcatctgaccatcggcttctgcggcgacctgaaattcggccggacggtgcactccctcaccgccgcgctgagccagttcgagggcaaccggttcgtgttcatctcgccggaggagctgcgcatcccgcagtacctcaaggacgagactctgaccccgctgcaccagacctacaaggagaccgccgatctggaagccgagctacccgggctggatgtgctgtacatgacccgcatccagcaggagcgctttttcaacgaggaggactatctgcggctgaagggctgctaccaactggacgcaaaaacgctggcactggcaaagcccgacaccccggtgctccatcccctgccccgcatcgacgagatcaagccggagatcgacagcgacccccgcgccgcctattttgatcaggtgcacaacggcgtgtatattcgcatggcgatcatactggcgctgctgggcattgccgaccccatcaccggcaaaaaggtgctggaagcataaaggagcagtatacaaaaacgggctgccgtgcagacattgcacagcagcccgttttatgttttataccttatgccttctcgacggtgatgctccactcgctggtcatggcctcgtccggctccagcacctcgtgcttgccttcctcgtttacgctgtttgcccagccgttccaaggctccatgcagacaaagctctcggcatcctgctgccacagcacgccgttttcaaaggtctcgtccgcgtccacggtcaccttgtggccgttgcccttgtcggtaaaggtcatggggaactgcacaccggtcagcagacggatggtgttgtctgcaccctccttgcgggtgagggtgatcttttccggggcggcaggctgctcgcccttggcgttctcggagcaggtggcgcacttgatgtcaaactccacgttctccagcttggaggcggtaaagtaggggtggtagccaaagctgaagggcatatcggtgttgccctcgttgatgacggtcaggctgaccagagccttgttgccctccagattatagttgagcagcagggtgaaatcgaacgggtagaggaacttggtcagcggggtggactccagtgccagcgtcacaccgtccgggccaacgctgtccacttcccatgcgcacaggtcggcaaagccgtgggtctccatggggtaagccttgccgtcaaagatgtgcacgccgttgtccgggttgccgcagctggggaacagcaccggcacgccaaagcgggggcggttgcactccgaaaaattggggcggcgggtccagacgaactcctcgccgtccagcgtaaagctggtgatcataccgccgcgctcgggggtgatggtgagggcggtctttgcctcggggtcggtgatgacgtactgctcgtagcaggcgccgttctcggtgatgtaccgggtggtgatctggttcataagtaaagtcctcctattattaccgccgggtcgcccctgcgggtcattcctcgtgcttggtctgccgtgcatccagcttttggaagtagtaatcgatgccgtagcggataaaatacttgatcagacgcacagcaccgtagatcagcgccgcatagatcagcagagaaagcaatactgcgccatttgcacccatcatatagaatacacttcctttccgtattttcaagcacaaaaaggccgccgtaccgctttttgccgtacagcagcccttttttcagttacagaaccacgccgtccttgaagatggagatctcgcggaagccgtgcttttccgccttggtctgctcgccgctggccacgcggatgaccagatccagcagatcctttgcagcctcgtcgatgctcttttcaccgtctgcgatgacaccggtgttgaaatcgatccagccgcccttcttctctgccagcggggtgttggtggagatcttcagggtgggagccggtgcggagaacggggtgccgcggccggtggagaacaggatcaggtgtgcgcctgctgccgtcatggcggtggcagaaaccagatcgttgccggggccgtagagcatattcagacccttggtcaccacggggtcgccgtagccgatgacgtccatgatgggggcggtgccgcccttctgcacgcagccgcagctcttatcctccagcgtagtgatgccgccggccttgttgcccggagaggggttatcgtacaccacctcgttgtggctgatgaagtaatccttgaagccgttgatcatgtgctcggccttgacgaatacctccttgttgatgcagcggtccatcaggaagccctctgcaccgaacatctcgggcacctcggtcagcacggtagagccgccgcgctgacccatcatgtcggagaagcggccgatggtggggttggcggtgatgccggacagaccgtccgagccgccgcacttcatgcccaccaccagctcagacacggggatgggctcgcgcttgaactgcccggcgtaggcagccagttccttcaggatatcgcgggcggcggcaaactcgtcctccacgtcctgacaggtcaggaacttgacgcggtcgtggtcgtactcgcccagctcttccacgaactgatcgtgctgcaggttctcgcagcccagatgcagcaccagaacggcagcggcattggggtggcgcaccagcgcagccagcagcttgcgggtctgtgcgtggtcgtggccggtctggctgcagccgaagggatgggtgaaggtgtacagaccctcgatggaaccggtgaccagatcctgattgtcggctaccatcttcttggcgatatcgttcacgcagcccacggttgggatgatccagatctcgttgcggatggcggcgcggccgtccttgcggcggaagcccataaaggtctccggctctgccttgggcagcggagccagatccggggcggggttatagctgtactccacctcgccggacaggttggtgtgcacgttgtgggtgtgcatccaggtgccgggggcggcgtctgcggtggcgtgaccgatggggaagccgtacttgatgacgttctcgccgttcttaatgggcttgactgccatcttatgaccctgcgggatatcctccagtgcggtgacggcaaggccgtccacctccaccagcgtgcccttggcaatggggtgcagggcaacgaccacattgtcgatggggctgatatgaattgcctgcggcatagttgttctccttatcatatcgcacaaaagggctgctgcccaaagcagcagccctttgttgtgcgggtaggttgatttttcagcttacaggcagctcttgtaagcagcctcggcgccctgtgcgcggatcatttccagatctgccagcacagcggcctccagaccctcgatcttggtcagatcctgatcccacatctgggtgttggtcagcacagcatgcaccagctgcgcagcggtgtcgtccttgtgtgcgtagtagaagtccagagcccatgcgtcgtcctggatcttgtaggtgttgcctgcggggcgcttgcagatcaggccgtcagcggtgcgctcctgaatatcgttggagtagaaggcgatgtaagcagccagagacatggtcaggcacttgggcagctgcttctgctcctcgatgtaagcaaggaaggagggcatgttgcgggccttccacttggaggtggagttcagggagatgctcatcagctcgtggttgacgaaggggttgttgaagcggtcctcaacagcagaggcaaagtcctccagatccttcttgtccagcggcagggtggggatgatctcctcgtgcagcatcttgttcataaagccgcgcacggtatcgttgtgcatacagtcgcggacgatatcaaagcctgccagataagcgcccagcacaaagccggtgtgtgcgccgttcaggatgcggaccttgcgcttcttgtagggggtaacgtcgggcacgaccatgacgttgacgccggccttcttgaacggcagcttgtcctccagacctgcggggccctcgatgacccagacgccgaacacttcgcccacgtccagcacggtatcgtggtagccgttggcttcttccagagcagccagctcctgcgggtcacggatgcggcccggaacgatgcggtccaccagcgtggagcagaaggtgttggcagtgttcatccagtcgatgaaagcgggctccagatcccaatccttagcgtagttgttgcagcacttctgcagctccttgccgttgttgtcgatcagctcgcagctcaggatgaccagacccttatcggcagcgccgttgaaggccttgtagcgctcgaacagcacgcgggtcagctttgcggggaagctgttggggggaacctgatcgaactggctgtcgcccttggtgtaggcaatgccggcctcggtggtgttggatacaacagtctccagatcctcagagcgagccagtgccagaacttcgtcccacttgttatcgatgtaggggcacacgcagtcggacacgcaggagatcacccgctttgcgtccaccttctgacccttttcgctgccgcgcaggtacagggtgtacagaccctcctgctcgttgatccagtctgccatctgggggaagttgccgatgggctgcaccagcttgaccttgccgttgtagccggccttctcgtttgcaacatcgtagaagtagtccacgaaagcgcgcaggaagttgccctcgccgaactgcatcaccttaacgggagcatccttcaggatgtagccgttgtagccagtgccttccagaaccttgtagttcaaagtttccatcttattgatctcctttataaacttgctttgcatggcaggctctcgtttcccctgccatcttctgttcctattttatgctgttgtatacaaagaagtcaagtgttttgtgcaatgtttttagtccaaaaatggctatttagcgcatttccagcggtttatacaattccaagggtgaaattttggcagtttttcagttgtatacatcggcattttccggtatactaaggataaggcagcctgcctgtttaaagcaggtgcaattccatgcccgtttttgtctaaattttaacaaaatttatcagagaaaaggagttaaaatcccatgaaagcatttatggataaggacttcatgctccagtctgctaccgcacagcatctgtatcacgactatgcagctgctatgcccatctgcgactatcactgccacatccctccccgcgagatctacgagaaccgccgcttcgagaacatcgctcaggtgtggctgggcggccgcaacccggacggcagctacttcggcgaccattataagtggcgtgtgatgcgctccaacggcgtgcccgaggagtacatcaccggcgacaagcccgaccgcgagcgcttccagaagtttgccgaggctctgcccatggccattggcaacccgatgtaccactggaccaatctggagctgcacgttttcttcggctacgacggcgtgctgaacggcgacaccgctgaggaagtgtggaacctgtgcaacgacaagctgcagcacgatcccaagctgaccgtccgcggcctgatcgagcagagcaacgtggccttcatcggcaccaccgatgaccccatcgatgatctgtactggcaccagaagatcaaggaggatcccaccatcaagttcaccgtggctccttccttccgtcctgataaggccatcaacatcaacaagcccggctttgctgagtacatgggcaagctggctgccgttgtgggcaaggaaaagctggcctgcatcgactgcgtgaccgatgccctgaccaagcgcatcgagttctttgccgagatgggctgccgcgcttccgaccacggtctggactacatccccttccgtgctgccgacaaggacgaagtgaacgccatctatcagaaggtgatgaagggcgagagctgcaccgtggaagaggctgaaaagtaccagacctacatcctgatccatctgggcaagcagtaccaccgtctgggcattgccatgcagatccattacaactgcctgcgcggcgtgaaccgcaagatgaacagcctgctgggtcccgacaccggctttgacatgatcaacaccgccacctgcggcggcgagatcgcacagctgctcagcgccctgaacgacaccgacgagtgccccaagaccatcatctacagcctgaaccccgccgacgacgcacagatcggcaccattctgggctgcttccagaacagcgaggtgccgggcaagatccagcacggctccgcatggtggttcaacgaccacaagatcggcatggaagagcagatgacccgtctggcaagccttggcctgctgggcaactttgtgggtatgctgaccgacagccgcagcttcctgagctacacccgtcacgattacttccgccgcatcctgtgcaacatcatcggccagtgggtcgaggacggcgagtatcccaacgacgaaaaggctctggagaagatcgtcaagggtatctgcttcgacaacgcaaagcgttacttcaatctgtaaggcctttccccttttcctgaattagatccttccgcgccgcccgcagacagctttgtctgcgggcggcgctttattttgcccttttgcgcccaaagtgcaccggatgtgccggtttttttacctttcagcggctgttttccgtctttttctacaacttctcctttatcccttgacttccttgtacaaggagagtatatttttgcatggcattcaggccaaatcgctgtattttttgatggaggagccccatgaacggtttaaaagaagccttcagccgcgaaaatctgctgaagaatctaaatttctttgccctgctgaacctcggccttgtgcttacggcagtaggcatcgtatattttaaaaatcccaaccatttcgccttcggcggcacctctggtctgtccatcctgctggcagacctgttcccccggatcaatgtgggcggctttatgtggatcatcaacgtggtgctggtggtgctgggctttgtgtttctgggcatcaagtgcatgggctggacgatctactcctcctttgcgctctcctttttcgtgtccggctgcgagtggctgtacccttccggcgcgtccctgagcggcgatgccatgctggatctggtgtttgcggtgttcctgcccgcattgggcgcggccatcgtgtttgacatcggcgcttctaccggcggcaccgacatcgtagcactgatccttgccaagtacacctccatggagatcggcaaggcgctgatggtcagcgatatcctcatcgtactggctgccgccgtgcggttcggcatgggcaccggcctatactgtatccttggcctgatcggcaaatccttcgtggtggacggtgccattgaaaacatccgtctgcgcaaggtgtgcaccatcatgaccgcgaacccgcagcccattctggacttcatcatccataatatgaaccgttctgccacggtggaaaaggcctacggtgcctacacccaccacgagctcagcgtgctggtgaccgtactcacccgccgtcaggctttgcagctgcgcaacttcctgcgggagaacgacccccacagctttatcaccatcgtcaactccagcgagatcatcggtaagggcttccgctccttcaactgaggattttgtattgacgaactgcgcaaaaaacgatatactatacttcggcggtgcagttgtgccgccggattccggggtgttgcgcagttggtagcgcgcctgctttgggagcaggaggccgcgagttcgagtctcgccactccgaccacaagaaaagccacgatgaaccgtttataaatgcggttttgtcgtggctttatttgttgctttctttggtacattcttccagaatgaaccatatttttgccttgttttgggcatagacagctgttaaaggggggcttaccactcttgacaagacttgattgatacgcaaagcagtttttactggaacagatcgaacgaaaatgcaaacagtgcccgctcaccgtggagatttagctccatcggtaggcaggcactgtttgcgtcaaatcatcagatagctcaatcttccagccagccatggtcacagccgagggaaagataatgctccgtctcccctctcagtaccatctgtgcatactccaagggcttgttgtatagcagccagtccagttctgcccgctgtgccggggtgttgccgtactcgtcctcaatggcaatgcacgcgaacttttgagaatacgccactttcggcattgtgcaagaaaaaacaatgaaaactttggcaaaaagagagagggctggacggtgccagccctcttgacaaggaaaaacacaaggctctttattataataaagctataagaacataataaaggcaattatttgaaatttttgaaaaacagaaatcattttgatgatatgggacgttttaatagacaggaagggggtgaaccgtatccagacagaattattgctgcggaaagtgcagagcggagatacgggtgcgctggacactctgattacagcgtactatccacaaattctgaactattgccgttggcatacagcggacgagcagcaggcgcaggatgcagcacaggaaacctttttgaaagcggtgcgctggctggattcctgtggtggatttcagggggcattccgtccctttctgtacaaaatcgcaaaaaacatttgcatcgatctgaaccgtacgatggagcggacggaggtatcgctggagagcttgccgggcgaacccgcctatctggaaagcggctttgctgcggcagaggagaaagcaaacctgcgagcgctgacggcccagctggagccggaacagcgggaactggtattgctacggttcgcacaacagcttaaattgcgggagatcgcgcagattacaggtctgcccctgcgcacagtgcagtcccgcctgcgtgccgcattgaaaaccttgaaaatgcaattggaaaaggaggactggagatgaatcgagcctttgaaaaagaactgtccagagcacttgcggcagagccggacacagctgtcccggaaacgctgctgcgccgctgccaggcggaacatatcgtaaaacaacggagtggttggcgcgatttgctgcactgccagttcaaattgctgggctggaaggtctgggcgctggaagcaatggcggcactggcgttgtacagtgtgggccgggaacttgccctgtgggagaaggcatggacattacgcaatgcactgtttggtctgagcacacttgccatgctgacagccctgctcggtctgccgtttttataccgggcaagtcaatataagatgcttgaactggaatatgccacatatgcaggaatcggtcgtccgctggtgatgcggtttttgctgctgctggcgggggaaacgatcctgctgggagtgctggtactcaatgtgcgggcagccgtgccatggagcatcgggcaactgctggcggtgctgaccgtgccatttctgactgcaaacaatgagctgcttctgctgctgcgctgggtgcgcccggaatggatgatgaccggggctgtaccactgtttgcagggcagatgtgtttgctgcggttcgtgcaattatcggaactgccgaaaggtctgccgctggcggcgggtgtactggtgctctgcatggtgttgcagtgcatccagcttgccgcccggtcagaatatattgcagaagcttgaaaggaacaagtcatggaactgaaaattcagaatattacaaagcgataccgggataaaacggcggtggatgatgtgtccatcactctcacgccgggtgtgtgggggctgctgggggcgaatggtgcaggcaaaacaaccttaatgcggatgctggcgggcattctgcggcccagcagtggccggattttgtgcgatggggtggaggttggaacgcttggtgcggcctaccgggaaaagctggggtatctgccgcaggaattcgggttttacccggaattcacggtgcaggactatctggaatatatggcggcgctcaagggtctgccgcgcacagaggctgcccggcagatcgacgcactgctggagcgggtaagcctgactgaggtgcgccgcaaaaagatcataaagctttccggcggtatgaagcgccgggtaggcatcgcacaggcactgctcaacgacccggaaattctgattttagatgaacctacggcagggctggaccccggagaacgggtgcgcttccgcaatctgctgtcggagtttgcgcaggaacggatcgttctcatttcaacgcatatcgtttcggatgtggaatacattgcggccgaaaatgccgtgatgaaggctggcaaaatcattgcacaggacaccaccgaagggctggtaaagcagatcgaagccaaggtctggcaggggaacatctcgatggaacagcttgcccggtgggaataccggctgcgggtagtgaacctgcgcaacgagccggacggaacggtaacattgcggtatctggcggatgcaccgcagctgccggacagcgtcccggcacagcccaggctggaagatctgtatctgtggctgttcccggaggaaatggaggaagcaaaatgaacctgtatcgtttggaattgaaacgtgtgtgcaaaacccgtatgacagctattctgctggccattgcattggtgctggctgtggtcatggcatatctgccggtgacctttatcgcctggacggaactggatgccagcggaaacgaagtgcgttacacgggtctgaaagcaatccggaaacggcaggagcagcaggtatccggtaccatcacgccggatgtcatgcaggaagcactggaaacctatcagcgggtgtaccggcagtatgatgcaagctccatcaacgatatcccggtcgaggtattttataaagaacttgcccggtatcagcctcttgtgaacaacgcaaaggaagcctttgccgactcgaaaaccggcatggcaccgggcgtgatggggctgaccgcagaggatatgcagaacttttacagccagctccccaaacggctggaatcggtgatctggctggaacaagacggaaagcccggctatgagcaggcgcaggccattgcacagaaaaagttcgatgctgtacaaaaaccgttcacctattcatttggggtcagtccagacgcaatggattaccagaccctgttgagcttgctgctcaccctgctgtgcgcggtgattgcggccccggtgtttgcatcggatgcacagaccggggcgcaggacatccaactgtgcacaaaaaacggcggtctgcggctagcagcggcaaagctagcggcggcgtttagtatcacaggggcggcgtatctgctctgcggcgtggtgtggatcctggtcacgaatgctctatttggctgggaaagtacccaaacttccgtgcaatggctgttttctgtgaccagcctgctgccgtataccgttggccagatggagtgggtcatgctggtggcaaacttcctgatcttctttgcggaggtggcctttgtgctgatggcatccgtatgggccaagaacaacctgaccgctttgtctgtggcgctgatcagtgtggtggcaccgctgattgtttatatggtcgtgccgggctcctttggagaatggctgtccaccctgcttccggcagggggcattgggctttccaatgcattgctgtataaaatgatcagctttgattttctctatgcaggcgggtatgccttctttcaggcagatgtactgctggcatcggcaccgatcaagatcgttctgctcgttggattggcagcatgggggtatctgcgaaagaccaaggtggcttaaaaggaaacgctactgaaaaaagttcatcggatgcatagaaaactgcatcggatgaacttttgtgtcctaagctccctgccatgaatcgtagttgttgatagactaccacaaaaatcgagccatgtcagcgtgaacttgtcggggcgtggcccctccatcttgctgcgcaagaccgttctgtcgcttaaaagccccactggggctttcattgctccgctccactgcgcaaacgcgaacttgtcggggcgaggcccctccatcttgctgcgcaagaccgttctgtcgcttaaaagccccactggggctttcattgctccgctgcgcttcgcaaacgcgaacttttgagaacacgctgatttcggcagcttgcaagaaaacacaagagaaactttggcaaaaagagagagggccggacggtgccagccctcttgacagaattatgagatgctcaaaaatttctgctgcttttattgcggttttcaaaaatagcgccaatcagaacggcatatttatgatatgcagtttgcggatactactgcgtgggaaaatagaatcaggcaaaaggataaagtgtcggcaggaaaaatacggacacgacgatgaggatgagcgccagcggggtaccacacttgagataatccttcaaggtgtatccgcccggctcgatgatcatgatctggcagggagctgccatgggggtcatgatggacacacagctagctgtgatcacgccgaccacggcggcgcgggggtctacgcccatgcggatacaggcggaagtgaccagtgggatgaagatggtcagggtagccagattggacatgacctgtgtcagaatgaagggaacaaggaagaacaccagcataatgatgtacggattggtggtatcgcccagcaggcggatcatccagtctgccaccacgtcgcctgcaccggtggtctggatggcgtccgacagagccagcacaccggcaaacaggaaaatcgtcggctggtggatggagttgagggcttccttctcggtcagcacacccgtcaacaccagagcggcagcgccgatgcaggaagtgagatacatcttgacaccaatgacattttccagcagcatcattgcaatggagaccagaacgatcaggacagccagtttgcgcttgaaggggctgagtttttcgctctcagaagccgtatgtgctgcatctgaaaactgctcgttgggaatatccggcatcagcttatagccaacaaaggtcatgtacaggatggcaatggtcagcatcgggatgcgcgcaatggtgaaatcccagatgtgcagcggtgtcggtgcgccggcctgcatcatgacatcgttccatgccatgttggaagcaccctgaccgagaaaggtcatctgggtggcaatgttggcacaggccatagaaggatacagcagcttgctgcggctcacgccgatgtcgttcgcaatgcctatcagcagcgggatcatgatagcggcagttgcggtggcactggtgatggcgcccagaaacgcacctgccacgcaggaaagaaaaatcagcatccgcatattgtccttgtagcggatgaccagactctgggctttgtcaatcaggggcgttttggtcagccctgcaccgatgacgaacatggctacgaacatgaccacattcgtgttgatgaagccgccaaaggcctcggcaggggtcttgatgccggtgaggatcagcgccagaatgatgccggtagaaatgaccgagaacgggactttaccggatacaaaggcgatgatcgttacaagcaggatgaccagtgtgatctccaatgggctcatttgggttgtcctcctgtggattacttccaccttgcagatgcaaagcagtggcaaaggtgtgtagaacaaaaagaacggtcaagatcttctttgtctgcattttttccgtgcacatatttgaccgcaaatagcaacacccaggatgctgatatggcagacagcatccggggtgttttgcggagaagcaggataagcagggtaatgaagataggagtaaatgataagaagtctgttggatctgtgaaagcaaatatggttgttagaattaacgtgatagtgagttcattttaggagaagaagcttttgatggatggttgctctccgcagggtataggcaacgctggcttcacagttggatcttatttgatgaagccaacgtgcttgcaaatttcctcgacggccttatccttgcgctgattgaagatgaccttgttctcttcgaacaggttgcgaccctcagcgtcgatggaaacgatcagggggccaaactcgttaacatggcagtgccacagagtttccggcataccgaggtcacgccactgggcctcgacgatttcctccacctcggtggcagccacaacggcgttaccggcagggaaaacacagtggatggcaccgaactccttgcaggcgcgctcggtgttggggcccatgccgcccttgcccacgatgacgcggacaccggacttctgcacgaactcatactcgaacttctccatacgcatggaggtggtggggcccacagacaccatctcgaatttgtcgtcctccagagggcgaatgatggggccggcgtggaagatggcagcgtccttgacgtccacaggcagcgggcggccctcttccacgaggcggcggtgcgccacgtcacggcaggtggtcaggtcgccgttcaggtaaacgacatcaccgatatggatgtccttcaggtcttctgcggagaccggagtcgtgagaattttctttccgtctttaatggtcagcattacaaagtcacccccgaatgagtatcaatggtgtagttcaggtctttatcgaaaatgatgtggccgcggcgatggctccagcagcccacgttgacggcaacgccaatggcagaaggatggcgggcagtgttctcgatgtgcacgcccatgacggagtacttgccgcccatgccctgagggccaaggccgatggagttgatgccgtcctccagcagcttctccatataggctgcgcgctcgttctcgttgtggctgcccagaggacgcatcagagccttcttggacagcagagcggcggtctcaacagaggtggcaacgcccacgcccaccagcagcggggggcaggcattgatgccgtagctggtcatgacatccataacgaacttagtcacaccttcgtaacctgcaccgggcatcagaaccatggccttgcccggcagggtgcagccgccgcctgccatataagcgtagatctcacacttgtcgctgttcgggatgatatcccaccacacggtgggagtgcccttgcccacgttcaaaccggtgttgaactcatcgaaggtctcaacactgttgtggcgcagaggtgcttcaaaggtagacttgaccacagcctccttcagcagaccctccacctcaccgatgagggggaagtccacgccgcactttacccagaactgcagcacaccggtgtcttggcagctggggcggttcagctccttggccagcttctggttgcgcttcatggtctcgtagatgaccttggacagaggagcatcctcctgtgcgcccagctcatccagctttttgatgatgtcgtccggcagcaccttggcgatatggctcacaaagttggccatataggtcgtcatctgctgcacctgttcctgtttgttcattccaatgcctccttagctttggtacattttgcgcgttggttcactcatattcaacgttcctgtccgctttactgcgggaagaacggaaatgcgatgggaaggatcaccatgctgacgacggttgcgatgaggatgaggggcaggccagccttggcataatccttgaaggtgtacccgccggcagaaaccaccatggtgttagcaggcataccgatgggcgttgcgtaagcgcaggagccgccgatgacacaagccatcaggactgcgcgggggtcggcacccatgccctgtgcgatgctcaggcagatgggaaccatcagagcggtggttgcggtgttggacatgaagttggtcatgacgcagcagagcaggaaaaccaccagagtcaggacgtagggagagggattctcgcccagagcaccaatgacgatgtttgcgatctctgcgcctgccccggtcttatccagtgcagaggccagagacagcgtaccaccgaagaggaagatggtcttgaggtcgatggacttcagggcatctttctcggagatgacaccggtgaggatcagagccagcgcaccgatacagccgatgatgttgagcttgatgccgatctgcttttcaaagatcatgcccagcagggtgagcacgaggatgacaagggagagcacctgtttccacttgggaacattgctgaagttctgctcgccgccgaaggagtcatcatcggagacgggatggttgggcagcagcttcatgccaagggtggcgtagaagaggatgccggcggcgaggatgggcaggcccacgatggcgtactcgaagaagccgaaggacatcccgatctcacccagagcgctctgggcgatgaggttgcccggtgcgccgatgagggaaaggttgccgcccatggccgctgcaaataccagcggcatcagcagcttggagcgggcatagccggactttgccgcaatgccgatgaccacggggatcaggacggcggcggtgccggtgttggagagcacgccgctcatcaggccaacgatgaccatgatggccacgatgaggctgcgctcggatttggcaaagtgggtaacaatgccgccgatcttgttggccatgcctgtttcaaacagtgcaccgccgacaatgaacatggcgacaaagaggatgacgttgctgtcgatgaagcctgcaaaagcagtcttgatgtccagcacgccggtaacgaccagaccgatacagacgatcatggacgttacgccgagggggatcttctcaaacacgaacatgacgactgcgaagagaagaaagagtagggtgatagttgctgctgacataccggggaatcctcctttaatgaaatataatgtatccatttttatcagagcaacacagccctgactttcgggacgccccagctacacctcattgtgcagagtctttgccgccgtgctgtgccctcacagccctttttcgttctggaaggatctgcccggaaccttagaattccgggaatctcggcagcgtcttttttaaatttttgtatttaatctttgataatgtatccacttgacgacacgagaatacacccgaaacagagatttgtcaatcccttttttcgagttttgtcgcattgcacggattatgtaccaatttttgtgcacgccagacaaacagtaggatacaagaaaatctccctccgccgccttctgcaaaaaacgtgcgatctccaaagcagatggagatcgcacgttttttccttcttttattccagccgctttttgaaatacccctcggcacagtaaatggcaccgcagggattatgtgccagaacgcgatcctttgccaccagcgttgtgaccatggcatccgaatacttataaaacatcgagtcgtgtcccacacaaagtccgacctcaatgttgaactcggtgtgctgttcgttcagaagctttgcctgtgcgatggggttgcacatggcctcaaattcgccggggtggatcttgacctcttccgggatgcccacttcttctttggagatgccgccggtcttgcagatgaccgacaccacctcaaacccctgcgcacggagcaggtcggccacgatgcgggcttccttccgcagacctttgcagaatgcaagacccagcttgtggtagcccatccgcttgcagaactccaccgtctccttcaggcggggccattgacagtagccaagcccctcaatggccgaacaattgatgtagaaatcgtgattctcaggcaaatcatagccggcgcgggcggcctccatcaccgaagcattccgcatagggcagtttttgggcatcttttccggctcgttgttggcgcaggccagaaccgtacagttcgcacaggtatacactgtcttgtcctccttgatcttataaataataggtcagcgcatcgtccatgctgcggtagatgtgtttttccatttcagcccgtgcggccagcgcatcccgtgcttccagcgccgcatagatctttttatgctcgctctgggagttgagggcatagtccaactcgctcatttccacaccaacggacaggccgttccacagctccgagagaagattgcgcattttttcattgccggaagcttcccagatctcaaaatgaaaggactggttgtagtcagtataatttccggcctgctgatgagaaagagcctcctcagcagtatccacgcagtttttgatcttggacaggtcagcgttgttctggcagcagagcatacatgccgtcccttccaaggcagcgcgcagctggtagtgctcccgaatcgttttttccgttacgcccaacacaatggcgcacttgttttgcttgacttccagcagaccgtcacgggcaaggatctgaaaggcctcccgcaccggtgtgaccgacacgcccagttcctgtgcggtgttttccagcgtgagttctgcaccctccgggatgctttttgagataatggctttccgcaaagcggaagctacccgctcgcgggcaggcagcagcttaatgggtttcagtcccagcatattgactccttatcgttaaaatcagatgcagcagttcttcttcataggcgttccatgcatccggcacatcaggggagccctgacggtccagcatcagcaggcgggcaagccggtcgttcaccggcgtaggacgtgcgctcacggcaaaggcaatgtaggtctcctggatgctctccagcagcttgcgatgcagcggatatggcaggacggtccgcagggtacggtgctgcagcatctcgccgcctgccaacatcgcatcctgcggcagcgcacgcatagcctgccgttccaactgagcccccaatgccagaatttggcgcagtgtctcttcggtcaaatctgccgcttttatccgattgttgggcaggcggatgataagaccctgatattcaaggatcatcaaggcctcccgcaccggcatccgagagacaccgagactctctgccagttcgttctgggtcatttcagtgcccgccgggatctgcccagataaaatggcctgctgcagggcttccaccacaccgccgtttttcttctggatgccgatatattccatagagtcctccgtgcaaatgtcttttttatattgtatccaattttacaataaaaagcaagccttcctttatgacaaacaaaaatacccggcagattctttatgaaaaatctgccggatatagaccggatgcccttggggcgttccattctgaaaaattgcaggacaaatgcaggctgtgttaattgttatgtaaccttgtcaatcaatcttccattcttccatggtcgcagccaagtgacaggtagtgctcaatctccccacccagcaccatctgcgcatactccagcggcttattgtacagcagccagtccagctctgcccgttgcgcaggggtgtagccatattcgtcctctatggcgatgcagtcgatggcaaggggagtgccaccctcgaaccgggcttccacccggttggtgtccatgttgtagcggcaggaaagcagtttgttcataaaacgcctccatgttttttacatttatttcttctgcggcggaaagttcctgctgtccgtttgcaaatccataaagccacttcctgacgcagccctttgcaggtctacccccatccaccacacgcccgattcttacaccaaacgcgaacttgtcggggcgggttccctccatcttgcttacgcaagaccgttcggtcgcttaaaagccccactggggctttcattgctccgcttcgctgcgcaaacgcgaacaacgctctttttgctctgcacaaaatcctgcatcgtttggcgtaaaattggcgtatggtgtagtttttactggaaattcatcaaaagaaaaagccagaaacttctcggtacatcaagaagtttcaggctttgttatcttaaaattggaaatttactgctcaatcggcttcatcgtggggaacagcagcacgtcgcggatagaggcgctatcagtaagcagcatcaccagacgatccacgccgaagcccagaccgcccgtggggggcaggccgtactccagtgcgttgacgtagtcgtagtccacctgtgccttgcactcgggctccagcgccttgcgctcggccacctgacgctcaaagcggcccttctggtcgataggatcgttcagctcgctgaaggcgttgccgtactcggtgcagtcgatgaaatactcgaagcgctcggtgaaggcgggatcatccggcttgcgcttggccagcgggctgatctccacggggtaatcgtagatgaaggtgggctggatcagcttgtcctccacaaaagcgtcgaagaactcggccaggatggcgcccttggtgggcacctcgggcagctccacgtggtgctccttggcggcggcgatggcgtcctcgtcagacttccagtcgttgaagtccacgccggaatacttcttcacggcttccaccatggtcaggcgctcccagtggctcatgtcgatctgcttgccctgatacgggatgaccagactgccgcagatcttgagggcaaggcgcttgtacagctcctccaccagatccatcatgccgtggaaatcggtaaaggcctgatacagctcaatggtggtgaactccgggttgtgcttggggtccatgccctcgttgcggaagatacggcccacctcgtacacgcgatccatgccgcccacgatcaggcgcttgaggtacaactcggtctcgatgcgcagcaccatgtccatgttcagggtgttgtggtgggtgtagaaggggcgtgcggaagcaccgatctcgaacggagtcaggatgggggtatccacctccaaaaagcccttctcgtccagataagcgcggatctccttcaggatgcggctgcgcttgatgaaggtgtccttcacctccgggtttgcgatcagatccacatagcgctgacggtaacgcatctcggtatcggtcaggccgtggaacttctcgggcagggggcgcaggctctttgccagcagggtcagctcagtggcgcgcacgctcagctcgccggtcttggtgcggaacacctcgcccttcacgccgatgatatcgcctacgtccagctttttaaaggcggcgtaggcatcgtcacccagctcgtcgcggcggacgtaaagctggatatcgcccttgtcgtcgcgcaggtgggcaaagcttgccttgcccatgacgcgcttggacatcatacggcctgccagtgccaccagcttgccgctgtcggtctcgttgggcagctccttaaattcttccttcaggtcggcagaatacgcgtcctgcgggaacttggtcagggtaaaggggtcgttgccggcggcctgcaggtcggccagcttctggcggcgcacctgtacctgctcgctctcggacagacccgcagcggggtttctcttttgctcttccatggttactcctacttagtttgcagaatgggtgatggccagcacggtgtattccacggtctggccggtgggcagcagcacttcgaccttttcgcccacagccttgcccatcagggcgtggcccacggggctctcatcgctgatcttgccgttgaaggcgtcagcttcggtgcggcccacgatatcgtattcctcggcttcgtcctcgccggtctcgcggatggtgacgtgggtacccacggagacgttatccacgctcagctcgctctcgtcgattataactgcgttcttgatggtctgctccagttcggtgatgcggttctccaccagaccctgcgtattcttggcctcgtcgtactcgctgttctcagacaggtcgccgtggctgcgggcttccttgatctcttcagccagctccttgcggcggacggttttgaggtattccagctcctcctgcattgccttcagaccggcagcggacatcttgatctcttgtgccatttgagaatctctccttgttattagctgtatttctttcgcgcagccacaaagccgcacaggaatgccattttgactacactattataatagcaagccggtgccttgtcaacaaaaaaggcggcagtatggaggaaaaagcggcgcttgccgtgtgccttttccatgctgtcccggaaatcgtgcgctctcccctgcttacatgaaaatgcgatcccggaaagtccgcagaccttccgggatcgctctgacatctttttactcagataagcttcggcacctctgcgcccagcagctctgccagccgggcatgacccttgcgggtcaggtgcataaagtccacctcgttgaactcgcactcggcggcgtccataaagtgcacgccctgccgctcggctacgatgcgcagctgctcggcgaccccgcgggatttctccacgcagcctgcacccatcacggcatcgtggaagccgtccttgatgcagggcggtgccaccaccagaatgttgggtgccttgccgccccagcaatccacgctcttcgccttgagcagcagccgctccatgcccgcgccgatgcaggcggcgtttgcgccaaagcgctccttgacgtcattcgtgcccagcatgatgatgagcaggtcgatgacttcgtggctcttgagcagggcgtaggccacgctcagtgcatccatggactcatgcagcgggtccacgaacacggtagtgcggccggaaagtccctcctcggtgaccagatactcctcgcccagcgctttttgcagacggcaggtccagcgctcatcctcgttgaaacggatgccgtggtcggcgcagtcgttggggtcggcgcagtagccgtgggtgttggaatcacccagacagagaatatgctttttcataaccgaatcactccttttccatcgtctgccggaagtagtacacagcgcccaccatcccggcgtcattgtgcagctgcgcggcacgaatttccagcccttcggcaaaggcgggcatgacagcagcctttaccttggcggcaatggggtcgatgagcagtttctgctgggcagatacgccgccgccgatcaaaatcagctgcgggttgaagatatgcaccatgcccgccagtccctgcgcgatctcgtccgtccatgcgtccagcagcgccagcacggtcttgtcgcccgcctcagcggcggcaaagatggcgcggccatccctccatgccgggttttcctcctgcgcggcgcgcaccagagcggtggtggcggcatagcgctcccagcagccctttgcgccgcaggtgcagtccacgccgtccagcgcgtgggtgcggtagtgtcccagctcgccgcccagaccccgcgcgccttccagcagacggccgccggtcaggatgccgccgcccacgccagtgcccagcgtcacgccgatgacgtccgtatagccctgcgcaccgccgacccacacctcgcccagcgtcatgcagttggcgtcgttggctaccgtgaccggcaggccaaaggtcttttccagttcggctttaataggtgcgccgatgtagttgggcaggttgccgcaggtacccgccacgatgcctttgcggctgtcgatctgcccggtggcagaaacgccgatgcccgcaaggctttccgccgggatgctctgcgcggcaaggaaggcttgtgcagctttgagcaccgtggtcaggatgggggtgcggtagccgtcaaagcttacgctctcctcagctttcgccagcaccatgccggcttcgtccacgatgcccagcttgacggctgtgccgccgatgtcgataccaagatagtgtttcatagcaggcactcccctgtgttatttttttgcggcgttgatggcaccggtaaagcgtgcggtgatctctgccgggcgggtaatggcaccgcccaccaccagcgcaaaggcaccggcttccagcgccttgaccgcctgctccgggtagtggatgtgaccctcggcaatgatctttgccgggcactctgcggacagcttgcggatgaagtcaaagtcgatatcgtcaatgccggtggtctcgggggtgtagccgcgcatggtggtgcccacaaagtcggcaccggcttcggcgcagagcatggcgttttcaaagttatcgcagtccgccatcaccagctgttcggggtactttgccttgatggcgcggatgaactgcgcggaggtggaaccgtccgggcgcagcgcaccggtgccctgcacggcaaggatatccaccccgcaggccaccagctcgtccacttccttcatagtgacggtgatgtacatgggcgtgccggggtagtcctttttgatgatgccgatgaccggcaggtccaccacctgcttgatctgggtaatatcccgcacggtgttggcgcggatgcccacagcgccgctcatggcggcagctttcgccatcaggggcatcacgccgccctccttggtgtacagcggctcgtgctccagtgcctgacaggacacgatgagtccgcccttgatctgtgcaaacagcttttccttttccatggtcttactcctccattctgatcttgacaactgccttgcgcacgctgacacagccgtgctgtacaaggccgggtttatgcagttcctccgggaagaacagtacaaatcgaccctcgcccagtgcaccggtcactacgctggcactgtcctgaaagccgcagtccccggtaaactccccgatctccgcgccgggcagattggtgtagccccagccctcgctgccggtaaggtctacctgtaaatcagcataaagcttgtggtactccgggtggtagcccgcatccgggtgcaaggtggcgtccatcaggttgatgaacaccttgtccccgtccacctcggtgcgccccagcggcagggcggcaaggtcgtgggtaagcagatagtcaatggcggtatccaagttggggtgcagtcccctgtaccgtaccagatgctgcagggtatcgcagatcattcgcgtttcctccaataaaagaagcgcccgtctcccctctggaaaagagacggagaggggcgcttttattctgttacagctttgcgatggcggcttcgatcatggcctgtgcttcggcaacgatgggctcatcctcggggatcaggccgggcatcggggcgcgcacgctgcccagttccaagccgtacatccggcgcaggatctccttttgcaccgcatacaggttgccgtgggcagagcacatcttatagatgatgcggttggcttcgtactggatggcgcgggcctttgcgatctcgcccttttccagatgggcgttcatagccagatacagctccggcatcacggcgtaggtgccgccgataccgccgtctgcgccgatgacgcggccggaaacaaactgctcgtccgggccgttgaacaccacaaagctgccctcgccgcgggcggcgatgccggcatccttgaacatctggatgtcctgcgtgggcatggagctgttcttcacggctaccacgttggggttcttcagcatctcgttcagcaggctcatggtcagcgccgtgcctgccagctgcggaatgttgtagatgacgaactcggtgttgggtgctgcagcggacatatcgttccagtacttggcaatggcgtactccggcaggtggaagtagatgggcgggatggaggcgatggcgtccacacccacactctcggcgtggcgtgccagctccatgctgtcggcggtgttgttgcagccaacgtgagcgatcacggtcagcttgcccttggcttcgctcatcacggcctccagcactgtcttgcgctcatcgacgtgctggtagatgcactcgccggaggagccgcccacatacacgcccttgacgcccttggcgatcaggtgacgggtcagcgccttgaccccctccaccgagatgttgccctctgcgtcatagcaggcgtaaaaggcagggatgacaccctgatattttttgatatctttcatgtttcaagcccttctttaattataattgtaagttgtatcaagctcgtacgctttccagttcgggcaacggcatcagcgccctcttgcggtgccctgcatccgcttcgacccttgggcgggtctcgcgtcttgcagaccgctgcgccaaaaattgctccctgaacattaagctcgtacgcttttcagttcgggcaacgacatcagtgccctcttgcggtgccctgcatccgcttcgacccttgggcgggtctcgcgtcttgcagaccgctgcgccaaaaattgctccctgaacatcaagctcgtacgcttttcagttcgggtaacggcatcagcgccctcttgcggtgccctgcatccgcttcgacccttgggcgggtctcgcgtcttgcagaccgctgcgccaaaaattgctccctgtttcggccgcaggccgcggtcgcaattttagcctttaacagcacccattgcgatgcccttggtgaagtacttctggaagatgaggaagatgatgatgatcggcacagcagccagtgcagcgcctgccatgatcagaccaaagtcggtgctgttttctgcctgcagctttgcaatgcccagcgagatggtcaggttgctggtgctggacagcatgatcaactgcatgaagtaatcgttccagctgttgatgaaggtaaagatggccagtgcaccgataccgggcttgaccatgggcagcacgatcttgacaaaggtgcgtgcctcgctggcaccgtcgatgcgggcagcttccagcatttcggtggggatgccctcactgaactgcttcatcaggaacacgccgaacggccaacccacgatggggaaaatgaccgcccagatggtgttgtacaggttcagtgcgctcatctcacgcagcagggggatcaggatgacctgcttgggcagtgccatggcgcagacaatgagggtgaacagcagcttacggcccacaaagcgcttttttgccagcgcataaccggccatggcggcggtcaggcaggtaaggatcatggacataacggccatgaacacggtgttgatcatccagcgaatagcggcgggagccatggggcctactgagaagtagatgggctcgccgttggcgctgaacttggagccgaagggcacagccagctgccacagcggggcacgcttaccggcaaacagcttctggtagttggtcagcacccactggctgggccaccactcgggggtagtggcgttgatggcggcaccggtcttgaaggagccggtgatgatccagtacagcgggaaggcgaacagcaccgccataatgctgatgaggatgatcgccagaatggcgtaggcgctcatctttttcagtttactgggatggcgcttcaacggtttttgcttttttgcagcagttgcacgcattgttccgcacctccttaattatccttgttgcccagcttgaactggacagcagacagaatggcgatgatcaccgccagcaccacgcccatggcgttgccgtagccgtacttgtactgcttgaaggcggtgtagtagatgtagtacataatggtatcggtcttgtggttggggccgccggaggtcagcagctggatcagtgcaaagcactggaaggagttgatggtggtgatgaccagaatgtacagggtggtgggcataatggccggccacttgatcttccagaagcactggaagtcgttagcgccgtccacctcggcagcctccacgatggactgatccacgttgcccagtgccgaaacgtacagcacgatgggctgacctacggaggtggtgagcaggatcaggatgatacagcccagtgcaaaccgctcgtcacccagccagttgatgttcttgtccagaataccaaggctcttgcccagatagttgaagatgccgtagtagttgttgtacatccacttccacaccacggtaacggcaaccgagcctgtgaccacgggcaggtagaacacgcagcggaaaaggcttgtcgcccactccggcaggtccacgatggcggaggacacccacagcgagaagatgcaggtgatgggcaccgacacgatgacgatgacgaaggtgttctttaatgcaccaaggaagatggggtcggcaaacagggtcttgtagtttgccagacccacaaagatatccgcgcggttcatggtggagtcaaagaaactggtcaccacgcagaggatcatggggtagatgacgaagcccagaaagaagatcaggctgggcagcaggaagcagtaggaggcgaaggtttcgcgccgtaccagcgcactgctgcgtttgggctctttcattgccgtctttgcagccaagaggatcaccagacctttcgtttgagagtgttttttccgtaaaagggcccctccctcacccggaggaaggggccttgcggttcagctgtgatacagttcagagaaactggcgcttatgcctcggcagcagcggctgcgtttgcgttgtccacaaaggtcttgacggcagtctcgacggcttcgccggagcccacgcgctgcagcatattccaccactcggtgcgggcggtggtccagcccggggtgatctggtagtagtcgcccagatagcccatgaacttgctgtactcgctcatgacctcgttgccggcgtagatgtcgcccacgctggtgcggacggggaagtaggtggaagccagcacgctgtccttgacctgagaggggtcggcagcgatgaactcgataaaggtctttgcagccttgatcttggcctcgtcgccgttatcaaagatgccgaagccccagatgccgccgcacagcttcgggtcgccgcttgcggtggggaatgccatggggaagatctcgtcgccgctgatggtctggcctgcggcagcggtgtcagcgttcagctgctgtgcaatgttccagcagaaagccatctgcagggtgccgttgcggaacagggtgatctcctcgccgccgttgatggagggatcgaagttgacgccctttgcatcgtacagagcctgaatggccttgatgttctcggcagagtcggcggtgtacttggtgtgggctgcatcggtaaaggtgccgccgtacatattattgatgatggcgcgggtgccctgatcgccgccctgaccgctgcagtagatggctgccacgttctcgtagccgcccttgtacagtgcgtccacagtcttgaggaagccgtcggtgctccaggtgtgcttgtcggtgtcgatgtactggtcagcgcccacttccttgaccttggtcatgttcacggccatgcagtgtgcggtcatgcacagggggtactcgtagtagtcgcccttctcgttgtggcaggcagactctacagaagcgtagatgtccttcttggcgtcatcggtccacagatcgttcagcggagccataacgcccttggcaccccagtttgccaccagacgctcggggccttccatgaccagatcgggtgcgctgccgccctcgatggcggtgttcacctgatcgtcgccgttggtgtagtccagatactccacggtcaccttgatgtcggggtactttgcgttgaaactggagatcaggttctggacggtatcgtcattgccccagccgccgatggggtatgtccacagcttgatgcttgcgccggtgctggctgcactagcagcagcagaggaagcggtggaggaagcagcagtgctgctggaggcggaaccgccgcaggcggccagtgcgccggcagcgcccagaataccggcagccttcaggaacgaacggcgggaaatgcagtttttcatggtagattctccttgttcatcttcttcgatccgcggtggatcgtgctccgttttgctcgtagcggctgctcgtgtccgcagccgttgtttgtagcctaattatagaaaataattttcattttgtccattcattcttttcataaattttcatttttaaacccagcagcctgcacaaaattgtgggatatcagaaaaaacacaataattttgcacacttcacttgtcaaaatagttacaaaacggtacacttcccgctgttatattgaaaacaactttcagagctcaaattgtaaaaatgaaaatcattttcacaatttgaagcgttttttctgtcaaaactgtgccctctgcacagaagcggcgggcaaaatgtggtcattacgcctcttgcacagcggcgcggtttctcttatacttttatataagaaggtaatcaccaaaacggcaccggtgcactgccggcagccgagtgaggagaaggaagaatgtctactaatttttgggagctgctgcagcagcatcagggcgacctgacaagatccggccgcacggtggcggactatctggtgcagcacgctgcggaggcacagtatctgtccatatcgtcgctggccagagagtgtcaggtggctgaggccacggtgttccggttctgccgggcgctgggctttgagggctaccatgaaatgcgcattgcgctggcgcaggccaatgccaccggcgtgctggtgaaccagcaggagcccgccccggacgccgacaccgccactttgtgcgagcacgcttcggcgctgttcatgaccgccatcaacggcacccagaacgccctttcgccgcaggcggtggagcaggccgtggcgctgctgcacagtgcccggcaggtgttctgcatgggacagggcggcagcatggcagccgccaacgagatctgcgcccggtttgcctgcatcaccaacaagttccgcgccgttgccgacagccatatgcaggtaatggctgccagcctgatgaccgagcaggacgtggtgctgttcgtctcctactccggcgctacccgcgacctgatagagaccctgcgcaccgccaaggccaacggggcaaaggtcatcctgatcacccactacgaggactcccccggcgcaaagctggcagaccttgtgctgctgtgcggcgcacaggaaagcccgctggactccggcagcatccccatcaaggtggcagtgctgtatgtggccgaggtgctggtgctgcggtacattctggacgacaagcccggcagcaccgaagcgcaggagcgcaccaccgaagcgctggctgtaaagctgctctgagcggttgtctccggcaaaacgtgcaagcaaaaaaggtgaagtgaccaaaagatcacttcacctttttgttttgtcagctcggcagcggggcgtccgtgtccccgccggggtctacgccaaaggcgtcgtccagttcctccggcagcgggtcggggtctgcatcaaaggcggcgtccggcacatcggcaaataccggcgtttgggcaagcgcagttccacccaccgcaaggcacagagccagcgcaaacgcaagacccagcagttttttgcacagtgattcatcatgtgtcctccttgtgtggggtggctgcttttggggtgggaactccctcagtcaaagcctgacggctttgacagctccctcggggagggagtctctggcgaaaccgaaagctttgtgctttagccagaaatcttcccgttctgccaagggtcccatcccagagggggctgtctgcgcagcagactggtggagtctggtttgccgtaaagcccaaaaaaggggagagggaacagctcccgtctcccctttgggttcaggtttgattcaggttgggtgggtgggttaggtggcagcaaccaactgtgccgtaaagactgctacgccagagtagctgcccgctttttcggacacatttgtaccagtatcctttgtcaagaaaaacttcaggggggtatctgccgcatatttaccggaatcagcactcatgacctcaccgcccacagcaatttcatcatcgtaagtggttccttttttgattgcataaatcaagtaggcatcctcatctgttttgatagcgaatttcgttacgccgccctcttctttagtggtagtcgagctaacggtgatttgtagcttcttcttgtttggaataatgttctttgtaactttcaccttctgggtatccccggtatccgcatttgcttctacttctgcgattgtgtctgtaaatgtaatcttggaaggtacgctccactcgtaagaagcggtaacaacatattccacattggtgcttgctgtcgtggtccggttatttttcatatttcatgttgtattctttagcaaagcagtcttaatcgtttacttttatatagcaaacgaaactttttactttatttgtaaaaagttggcaatctgcaccgcgctgcgcggcgcagcccatggcaaggcagcaccgcatgagctgtgttcacctttgatgtgaatcaggtgaaaaagcagacaggccgcatcccttgacttccgcctttagggggagtatactccgtggcagtgaaatattcggctatgacgagaaagagtacccggaaagaatgctgcagagagctgccggctggtgcaaggcagtgcagggcatccgtgggaagatcctctccgagctttcctgctgaatgggcggtgtatacgccccagtaagcgggaacggcaggcttccgttatcacgagccgcgcattgttggatgcgcactgaggggtcgggctttgcaccggcaataagagtggtaccgcagaggagtttatacgcctttgtctcttacgaaccgtaaggggcaaaggcgtttttgtttgcgggaaagccatttcccggatgtttcattgcctttacatccgcaaaaataagtgttcaggaaaaaggagtatcatcatgaaaacattggaaaaagtaagcgattttgtgggcaagtacatggccgtcatcgtcattgtggtggcggcactggcgctgctgttccccggtcccttcagcgtggtaaagaccgcgtgggtcaacaccctgctgggcatcgtcatgttcggcatgggtcttaccctgaagccggaggacttcaaggtggtgttcagccgcccgaaggacgtgatcatcggctgcattgcacagttcaccctgatgccctttctggcatgggcgctgacccagctgttccacctgcccaccgagctggccatcggcgtcattctggtgggcacctgccccggcggcacttcctctaacgtgatgacctacctttccaagggcgatgttgcgctgtccgttggcatgactgccgtttccaccgtgttggcacccttcctcaccccgctgctcaccctgctgtatgccggccagcgcgtggatgtgaaccctgtaaatatgttcctgtccatcgtcaaggtggtgctggtgcccatcgcactgggctttgtggtcaaccacttcttccacgccttcacccagaacgccgtccgggtgctgccgctgatctccaccactgccatcgtgctgatcatctgcgccgttgtgtctgccaactccgctaagatcatgaccagcggcctgctgatccttgccgtggtcatcctgcacaacctgctgggctacctcaccggttttggcgtgggcaagctgctgaagctggattccaccaagtgccgcgcgatctccatcgaggtgggtatgcagaactccggtcttgccacctctctggccgctgcccactttgcacagtatccgctggcaaccatccccggcgctgtgttctcggtgtggcataacatttccggcgctgtccttgccaacttctttgcccgcaccgcagagaagaaagactgatccttcctacatataatataaggggctgctgcacaaggtttcttccctgtgcagcagcccctgctttgtttataatatgtgtcgtgcgcgatgccctgcctttgcctgtttgccgctctgttgcgcaggcaaaccctccgataaacaaaaaacgcacccgaaccctctcgggttcgagtacgaactgtatggtggagaattagggactcgaaccccagaccccctgcgtgtgatgcatgacggcttttcggtttttgtaacgatgattcgttaaatattctcaatttgctacagatctgctacaaacgcaacttttgaggcggtaataatctctcccgcttctcaatatatattttcaaataatgtctcccaataattcaaatcgcacttattcgcagacgccagaacatctatatggccctgtctatctcgacaaaactcactttataagtttgtaattaaacacttattgacctcctgccgacaaacgtgtattatattactatattaaaattcactttcgaaacacagtttgttgattatgccgaggtgtgtcttatggatactcaagaatactctgtagcaactgtactctcatcatttagccattgcgaactaccaaacctaacagattactcagttcttaacaaagtggactctgaagaatttttctttgacccccctctaaaactccatgaacatttgcaaagcggtcctttcattctaatttcttcacccggtgcagttggcaaaacaacactcgcaaagcacattgcctacaaataccatgggctatactggaatactgccgccaaacgtgtcagtggaacggcctttgctggtgaggttgctcacgcagtaggcatcggaaaaggtcaacaacaggatttgttttatgaaaatctcaaatccggaaagagctttgttgttctcgacgcttttgatgaggccgctttaatttctcaacatgaaggaatcgaaagttttctcgaagagattggtagcatcttaagaggtagttcgggtccatcaatcattttgacagctcgaactgaaatggccgaatttttactaaagacctgtcaaaaatacggttttggtgttacgcattacagcattgaatattttcatgaagcatccgcttcagaatttatataccagtatctctcttaccaaaaacgcaatattactgctgcccaaaagactgaaattcaaaaatatattaatcacatagcttccataattggaaataatcagcctcgtacatttattggctatgctcaagtgctgcgaatcttagcacggcaagtcgaagatgtcctcaattctagtgacgacctcgattctcttcgtctttcaatgaaagtgaacagttcgagtcatttaatatatagcattattcaggaattgcttttacgtgagcaaaagaaattagactatttaaaagaccgcattcttcctcactataaggatcccgaatccattcaagtcgtcaaaaatctttattctaaagacgaacagctattgcggctgatgtcttttatcactttcaatggcgcaataagtgtatctgactatgatgcctgttcaaagcttctccaagaggatcaaaaactgtatcaagaagccctaaacagctggctaccacaacatgtttttctgcaagaacgtactgttatgcccatttttaaagagtatcttctcgcagagacattgctcaatccttctctagagattttttctgatgtaaacgatagttctattcgtagccaaatcaaacttccctcccgagtatttttggattgctaccttgcaattagtaaaaatacggttcaaggtgatcatattttctacatcgatgttgcatatctttctcaaaccactgtcaaccaaaaaactttatgtgacatcggccctctagaatctgacgacattgacgatgctgatgctgattcgaatctgtatttaacctttactgattctctaacgcccaataagcccgcattacaagttcgtatttgtcaagattctaataaaccgatttatctcaaccggctcgaaaatatgagtgtcaactttgatgggcgattaattttaaaatgcggcctattttccgatcatgtgtcaatccgtaattcaaccattgaatgtgacacgcttgaattggccggttctgaaatcgtctgcgaaacttacaatgcagaagagaaccgtattattattcattctaatgttactcgtgctccagggtgcaaaatcatcgtaaggggaacaaaaaatgtaaaaatagacattcctccccaaaaagagctcaagcagttgttatatgaattttctgcctactggtactcttttgattctattagcgtttcaacttctgagcatgatgcaattgaacaattcgtttatggtctgaaaaaagtccttgaacaattcaaagttgataaatatggtgatgatcccgcaaaattcaaagacaaaattgacgctcgttgtcatacaggcgtaaaatcccgcgtgctaaacttcttaaaagatcgcaacattgtctatgaagacgattatgtttataagtgtagtttacaccttatggacgagtacggcattaaccgcaccgcttatatccagcaaaattgctctaatctgtcccttgcatataatcgatatattgaatggtttgaccagaacataaaataacataagcacacaagaataagaggcatccgattttaacgtcggatgcctcttgtctttgtggatatgttcctttgctaggctgttatagtctttttcacaatcaaagctgtttcgcaataatcgcatcaacatctgcgacgttcaaagacacatcattgcaccacatgccaaattcaccggttccattgactgcttcaatccatgtgctgagtgcttttcttttcgcaatgtctttttcagtcatacgacctttagtttccaaaaccagtgttttagcattatcgagttttacaagataatccgggatgtatttacgcacaacgccttcatacacatatacgatttcaaatcccaagtggtcatttttagcccatgctttgacatgttcgttcttttctagcaaatatgcttctgtcgcctcccaaccgctatcatacacacaatggctgatttggctatgctgtgtaatattgcagggtttgctggtataccatgtcggcatatctgctgtgcttctgacgcgccgattcgcatcaaaaaccgggactgtcttagaggtcatttccagccgaatgaaatcccacaagtgctgcacaatacggttcatgttcatcatgtaaataatccgtctgcgtactggatctgtgccatacagtggaggatcaatctgaattgctccggattcaatgtacttttgcgtcaactggatgacctgtcccagcaacgcaaactttgtgccctgattctgccacgaggcgttcatctgctcgtatacctgtgcggctgcctcaaaaacaatgcgctgcatccgcagttcggcgtccagcttttgcaggtcaatttccgtgcattttgtcaaatccgtttttccatcaataatagatgcaaggtcagcccgtaagcgggtttcagctgcttgcagcgtcagtgtatcaattttatcgatatcaactttcaaccgcggcttgaaaagccggtcgatccattacaatgaaagtgaaagaaaaaaatgattggaggagttgctatgacacagaatttgacttatacccgttgtggtgattatctcatccctgatattcggttgagttatgtaagcgataaaccacttgggaagtccggtagaatgcgcagagtttttcttgcggaaaatagtccaatactcttggatgacatgattctaacagagacattatttccgcatttatgggaaattgacgaaaccgctcactgtagagtggaacagataatgactgaacttctggagaaaaatccggctccggataagtcagcccaacagcttgcttgggtgcagcacatgagtagtctaaaagcacaggctgcggaagtcgttaatgcagaactgattttttgctaacagaatatagagtttttacttagggctgactgtaacaggtcagccttatttctttgatgggacaattcttgaattgcgtttatggcagttccagaattgtgtttttgacaattcaagaactgtcaaaagcacaatgcaagaatactgataataactatactgattatagtgatactgatcttatcctttcctatccggaatggaacaggaataataagatgtaatataactaatgttgaggctgtggtctgcctttattgtagaaagtttttcgctatctcatataaaagcgtgattgataagcattaaattttaataattttgtgatttcggttgtaattttcatagatttcgcatataataaaagtgtgattataaagcataaaactccaataaaaatgtgatgagtgattctatggaacgatttatcttaaaaaagttgctggattggaaggattctccctaccgcaagcctttaatcttgaagggcgtacgtcaggtgggtaagacttggattctaaaagagttcggcagacgctgttatgaaaatacagcctactttaacttcgacgaaaacgaagaatataaacaattttttgaaacaaccaaggatgtggaccggattctacaaaaccttatgctggcaagcggtcaaaagatattgccagaaaagaccctcatcatctttgacgaggtacaggactgcccgaaagtcattaactccatgaaatatttctgcgagaacgcaccgcagtaccatgttgcctgcgccggttctctgttaggtaccgccttggcgaagccttcctcttttccagtaggcaaggtcaacttcctgcagattgaccctatgaccttcacagaatttctgcttgccaatggcgacgaaaaccttgtgaagttcttggaaagcgtggataccatcgagccgattcccgatgcctttttcaatccgctctatgaaaaactgaagatgtactatgtcaccggaggcatgccgaaacctgtgctcatgtggacggaggcacgggatgtctccgccatgcaggaagccctgtctgggattattggtgcctacgaacgtgactttgccaagcgccccaatatcagtgagttcccaaagatctctatgatctggaagtctataccgtcccagctggcaagggagaataagaagtttatctacaaagttgtcaaagaaggcgcaagagcccgagaatacgaggatgctttgcagtggctggtggatgcaagactggtgcataagatctaccgcagcactgctcccggcctgccggtggctgcctacgatgacctgtctgcatttaagatttatctggtggatgtgggtttgctccgccgtctggcacagctggctcccacggcctttggagagggcaaccgcctgttcaccgagttcaagggcgctttgactgaaaactttgtgctgcagaccctgatcacgcagtttgaagtggttccccgctattggagccagaataatccaccttatgaagtggatttcctcattcaacgggaaaatgatattttccctgttgaggtcaagtctgaggccaataccaccagcaagaacctcaagaagtttaagaagttgttcccggatcaagtcaagctccgtgtgcggttctctctggataatctgaagctggatgatgatgtactgaacatccctctgtttatggcagatcaggcagatcggttgattgggctggcattggaacataaacacggatgagcaaaggagatcaactatgaatagatttgatataattaacagaattggtgacaagtatcgtgttggaaacactgaaacgggagaatttagctacgctcaagcgctaaaaaccgttggtaaggacatcaaagattatcaaaaggctacaactggaacgcaacacaaattccttgacatccgttttgaaaatgaacgtttggtagttcttgtggaatgtaaaaacaagttcagccgttgggataaagctaaaattcagggtcagttacaggattatgttcgcttcgaaaaagcatattcggacaaaaagattgttgctatccttgcagaaaccgatggcgatgaagtttgggtttggtttggtcaatctgtcattatcgatgacgaacatcgcatggaagaagaaaccgttcttcgtacatttgaagaatacgaaaacttgtgttttggtagggtaaacgacaaaatcaaagttgttgattccattaaaacgcttaatgaaaaactccattcagatggcatcaatgaaaaactgcgtagccagtttgttggtacttgtcttcttgccctcaaaaacgggcttgtttacaagaatgtaaaggaaacactcgacccgaaaaccggaaagaagcttgctcccgagcgtgtcgttttgaaaagcattaaagatattctggagggcttgcttactcgtggcggcagtctgaacaaagcaggaaagctcgctgttttgaacagtaaagtgcttgatgatcaggatgttacaagtttgacctataaggaacttgaggatattttgcaattcattgatgacaatgttgttccttatatcaatgacaagagtaccgctggacaagatttattaaatctattctttaccacattcaataaatatgtcggaaagtccgataagaaccaggcatttacccctgaccacatctgcgattttatgagcaaagctgttggtgtaaacaaaaactcccgtgttttggacccctgctgcggaagtggtgcttttcttgttagggctatgaccgatgcaatggatgattgcgatactgaagaagagcgtgaagaggtcaagaagaaccaaatattcggcattgaatatgaggagggagcgtttggcctttcctctactaacatgcttattcatggtgacggcaactctaatgttgttcaggattctatgtttaagcgggccaaatggattgcggaaaacaatatcaatattgttttgatgaaccctccctataacgcaacaaaaaagtgttgtgatccagactataccaagggatgggatgccaaaaagaaagaagatccctccaaaggtttacatttcgtagagtgggtagctcgccatgtcccgtcaacctgcaaaatggcagtattgctccctatgcaagctgctattggtaacagtggtgatgtaaaaacattcaaaaagaaaatgcttgataactatactctcgatgccgttttttctcttcctacagagatgttctatcctggagctgcagcggttgcttgttgtatgatttttgatctttcccaaaaacacgaaaaagcaaataaagaaaccttctttggttattataaagatgacaagttcatcaagcgtaaaggattaggtcgtgttgaacggaccgatgcagatggcaatagcctatggaataaaacggaagaaatctggcttaacctgtacaagaacaaaaaagtagtgccggggttatcggttatgcatcgagtttcgtggaaagatgaatggcttgctgaagcatatatggaaacggattattcaacacttgttgctgaggattttcagaaaacaataaatgactatctttcgtacttagtcaaagagggccacatatatgaagcttaacatttctgattggaagtcgttttgtgcatctgatattttctttctgtataatggcagcggaattactaaggaagaaatcgaagataatcccggtagttttcctgcagtccaaagtggagctgataataatgggtgtatcggctatataagcaaagattattgcaaagcaatgaattacacttatgtagaagaaccttgccttaccgttgcaaggactggttctgccggatttgttgcttttcagccatatggctgcgtcgtgggcgattcagcaaagattcttttactaaaaaatactgaacacagaaaacctgcagtttatttgtttctcagaaccatcttaatggcaaatcaatacaagtacacatatggacgaaaagttacggaagataaatacctgtccgaaactcttttactaccaagtattgattccattacgccagattgggcatttatggaaaagtacattttatctctgcaccataaacccctaaaaacagcaattactgagcaaacaccgcccgaattaaacacaaaaacttggcatgagttttttcttcatcgcatcttgatttgcagtatgggaaatggaatagatgcagtcattactacgagtgatgagccaaaatacaactatgtttcccgtgatagtaatggcaatggggttgtaggcttcgtggatgaaatagaaggagaagagccgtttcctgcaggagcaatgtcgttagctttgggtggtagctttttgggttcttgcttcattcaaaagaagccgttttatactgcacaaaatgtagctgttttacaggagaaagtccctttgtcggatcacactaaactgttcattgccacgctcatccgaaatgaatgcaagatcaaatatcaagcatttggtcgagagttgaatgcccatttcagaaaagattttactataaaacttcctgttaaacgcaatgctgatggtattgtgtttgatgaaacacacgaattttctgatgatggctatattcccgattggaagtggatggatagttatatgagatctttgccatatagcgatagattgtaactatttgtttctcgtaacattagtaaaaacgctcagcaacaactggagatgggacaatgccccaagcaaaaagcaaagttctctatcaaaatcatttattctgatgaaggttcggcagcagatttgatctatatcctcagtggcggaaaagtgccgataaggaagaaaaactgatacggtagctacaacattgacagccttactacagataaaaaacggaggcatatatgcaattatcaaaaataagaattagaaattacagattgcttattgatgccgagttggaagtcgatcccaagacaaccttaattgtgggtagaaacaacacagccaagacatcatgcttcgtgtgcattagtaatgtactggaaggggaaaatatatcctttaatgattatccactgttaaagcgggaagatttctatactaaaattgcactgtttatggagaaaaaactctcctatgaggacctttgcaaacaggtcgaagttatttccattgattttttagtggactactcattggatgacccggacgacaacttgggggctttgtcgccatttattatcgatgtcgatgtagatacgacaaccgctctgattcgtgcagagtatcgactaaaaaccgacgaaaaaacattgtgggcactattggaaagcagctattataaagacggcgcttttgctccgaatgaggaggctcatgatgtgcttgctgataattttggaaaattgttcggattgaccgtctatgctattaatccgaacaatttggaggataagcaagtaaaaagccaaaaagaactacatgatttgttcccattccacgctattcccgctgaacgtgttcttggcgaggatgatacacagaatagttctcttggttcgttaatttctggtttctttgatatgagcgaaggagatttggatccggaagttgccgaagaaataaagcgattacgtacaatagtagaaaaagccaataagaatgttcagaagcaaagtgatgaaatcctgagtgcagttgtgaacagttctattggcttcggttaccccaatatagaagaattgaaacttggagtcacaacgcagctcagcattgacgatcagataaaaaatcagaccaagctatcgtatatctctggcacagcaaacgaaagcttgccgagttcttacaatggcttgggttataaaaatctgattaaaatggagttcctccttgctgcatttgccaaagatattgaaaaacgtggtgttgcctgtgttccactgctcttcattgaagaaccggaatcacatatgcatccgcaaatgcagactgcttttgccacatatttagaaaagtttcttggcaagctctctaatgtccaaatccagacttttctaacctcgcattctgctcacatagcaaacaccatggagttcgcaaaggttcgctatgcgcaaaagtctaatgccggtgtgatttacaagaatttgaacacctttgctcaggccaattctgataatgtaaatttcatccggaagtatttaactttgaccaaatgtgatttgttttttgctgataaagcgatttttgttgaaggtgcttccgagcgtttgttgctgccggacatgattgagaagtgtgaagcgaccggagtgtttggttccggtaagtatcctttatctgcacagtattatgcgttgattgagatcggtggagcctatgcacataaattcattccatttattgaatttttgggagtaccatgtctgattcttactgatttggattctgtagcagaccgaataagcaaaggtggaaaagtagtaaaaaagtccgtagtggttagccaaggggaaacaacatcgaacgaaaccataaaatggtggatccgcagaaataagggtcttccagagaacgacacatcaaaaatcgacctcacagtaatcacctcgatgtctccggatgacaagaccaggggcaaatgccatattgagttccaaacggccgaaaacggattgtgtggacactcgttggaggaagcagttcgtaatgtcaaccgaaagcactacgatttaggcgacagcacaagcgaagaagatcttgaatttaagggcaaaagcaaaacggattttgctctcgatcttatttgtaaatgcgccgattattgcgttccggcgtacataaaatcgggattaacatggctaaataaccaacgagttcttgagtaaggaggtgccagtacatgggtggaaagcatacaggtgcaaactatgatcttgcaaaagctgaagctgacaaggttgatgcacatattattgaaacacttaagaccgggcacagttttcgtgtcgaagcaggtgcgggttctggcaaaacttactctctgaatcgagtaattgaatggatacaggcaaataaatggtctgattacagtcgaaaaaaacagaatgtggtctgtatcacctatacaaatgcagctgtagacgtgattgcagagcgacttgcaaaagattcgtttattctcccttccacaatccactcgtttgcttggaatgctatcaaacaatatcagagcgttttgattgatgctgttacaactaaccctgattttctaccggatgagggtgattttaataaggttacagaagttgcatatactttgggacatcgctacaaagaaaatggtattcagtacctttatcacgacgatgttctaaaactattctgcctacttttagataacgctaagtttcgtcgtgtgtttgcggacaagtatcctttaattctaattgatgaatatcaggactcttataagcctattattgaccgatttgtggattattttattgcaaagggtattggcccgcaattcggttttttcggtgatgcttggcaaacaatctatcaatccaataaggcttgtggcgcaatagaacatgacaatatcgatgtaatcaagaaaagttcgaattttagatcctcaccgagaatagtacaacttctcaatgatattcgtccagacttaccccaaaaatcagcaatagatgactttgaaggagaagtgtttgttattacatgcgaggattatactgcacctcgtcgtgcagaccgtaatttcaagaacgaattacctccagaggaattgaaatcacgattaaataaggttactgaaaaaataaaacaagaaacacctgcggatgaagaattaaaagttctaatgattacgcacaaggttcttgctacacagcaaggatacgagaaactcctggatattctgaatgacggattgagagacaaagaagacccgttcctattgttctttatggagaccgttgaaccgatctatcatgcgcttaacacctccgatatgcagttgctttttgatacacttggaattaagcgttatccaattaccaagaaggctgagaaaaacaagtggaaagaactacagcgtcaacttgatgaggcacgcaagaaaagagccattgatgtttttgaaattatcaaccggactaaattgattcctataccacccaaattagatggttggtatcatttgtaccagaatacacctgaaacaatatatgcttctaatacttcaattgaagcgttcttgaatctggattacgcacagtttattgctgtgaaagacttcttacatccagaagcacagtattctacagagcacggagtcaaaggagaagaatacgacaatgtgatttttgttatcagtaaaggatggaaccagtaccaatttgaaacctatgctccaatgataacaaaaaaagctgtcataccaagtggaaaacaagcttcctttgagcgtaaccgcaatttattttatgtatgttgttcaaggccaaagaaaaggttgattttctttgtaacggttcctattgattccaccttcaaatcgtttttgattgaacttgttggagaacagaatatttttaccttcagccagtatatcgaaagaaaatcgattaagtagtcagaagtaagacatcacttatcgttctttgaacggtgagtgatgttgctatagaagtcaataaagtagtccaccacatccggcagggcaactctgccgctggtgtccatgtactcatagattgctttgagcagcaccggcttgtaggaatagctcatgtccatcgtttcaataaacttcatgaacttgtccgccatattctgcggcgtaatgagatcccagccatactgtttggcaatattgcggatctataataaatcatttttattttactcctgcaaccaaacgaaagcaattcacgggttgcactgcatcagtctctttttattgtagcaccatataaatggttatcacgatctctattatttttaataaaagcaatgcagatacaatatattttctgagatcaaaaacttctttttcaatcagatgcggtttatcatcgatcattgaatattcttctaacgggcgctataataaaagaaaacggtaaggaagtgcacctatgctccaccccggactgtatgaacaggtcatcaacaacgcgctgaacagcgagcttgcagagatcccggaagcccgcaagtccactgcgcccatcgacacggcggaggctgccaaggtgctggcgcagtatctgaccgacgtggtgcagaagggccttgagaacgtgcaggacaacggcggcggcatcgaggcgcaaatccagctggcaaaccagatcataaataccatccagactactacagaggaagctgactttgccgcgctcagtgttgaccagcgggcagagcagcttcttgcgcttttgcagcagaacgacccgcgccttgctacaggaaaaagcgcaaaagaccttgaccgcccggagacctccattgcgcaaagttccctgtttaccggtgctatccatgagccgcagatgtacacggagctgaaaaaggagattgtctccgccgaccgcattgatatgctggtctcctttatcaagtggagcggcttgcgcctcatcatggacgaactgcggcagtttgcgcaaagcggcggtgagttgcgcatcatcaccacctcttatatgggcgctacggacgtaaaagccattgaggagctgcgcgcgctgcccaatacaaagatcaaggtcagctacgacaccaagcgtacccggctccacgcaaagacctatgtgttttaccgggacaccggttttactacggcgtatgtaggctcctccaacctgtccaatgcggcaatttccagcggtctggaatggaacgtcaaggtgacccgaaaggacctgccggagaccattgaaaagatcgcagccacttttgaaagctactggaattccagcgagtttgaatattacgatgaaggacagcgggaacggctgacccgcgccctgaaagccgaaaaatacagcgaggccgaccacagcggaatctataccctggatattttgccctattcctaccagcaggaaattctggaccggctggatgccgagcgcaccgttcggggttacaaccgcaacttggtagtcgccgccaccggcaccggcaaaactgtgatctctgcactggattacaagcgcttctgcaggcagcatccggggcagccctgccgtctactgtttgtggcacaccgggaggagatcctgaagcagagcctgtacaccttccgggcggtactgaaggatgccaatttcggcgagctgtatgtaggcagccacaaagccgacagcatcgaccatctgtttgtttccatccagaccttcaattctcaggagcttgccgccaaaacggcagcggatttttacgattacatcgttgtggacgagttccatcatgcagctgcacccacctaccagaagctgctggaatactatcagccgcagattttgctggggctgactgccaccccggaacgtatggacggcaaaagcgttctggactatttcggcggacgcattgccgccgagatccgtctgccggaggccattgaccggaaactgctttgtcccttccaatatttcggcgtcaccgacaccgcagatctgagcagcctgaaatggcgtaccggcggctacgataaaaacgagttgtccaacctgtacaccctcagcggcatggtggcggagcgccgcgctgaccttgtggtgaactccatcctgaaatatgtcaccgatatcgacgatgtgaagggtttgggcttctgcgtttccattgctcatgcccaatttatggcgcgctactttaatacccacggcatcccgtctatggcgctgaccggcaattctcctgacgaggagcgcaacgccgccaaacagcggctggtttccgggaaactccgattcctctttgtagtggacatttacaacgagggcgtggatatccccgaggtgaacacggtgctgttcctgcgccctaccgagtcgctgaccgtgtttttgcagcagctggggcgcggcttacgtctggcagaaaacaaggattgcctgaccgttctagatttcatcggacaggccaacaaaaagtacaattttgaggagaaattcgcagcactgctctccaacaccacccgcagcgtcagccgggagcttaaagagggctttgtctctgcacccaaaggctgctatattcagctggaaaaaattgccgcaaagtatgtgctgaataatatcagcgcctcctatgaccgcacctccgggcttgtggcgcaggcggctgccttcacagaggatactggtctgcccctgacacttgggaacttcctcgactactatcatcttgacccgcgtgcaatttacagcaaaaaggtctgcttcagcaggctgtgcgtccgcgcaggggcggcatccgattttacagaacctttggaagaaactatgaccaaagcctttgcacgctttgcggtcatcgattcctgcaggtggattcgttttttgctggggcttctgccaaaattggataacaccgactttgcggctctatcgccagtagagaagcggatgctgcaaatgttctatgtgactctctggggcaaaactgcagaaagctgggaggatgaagaagttctcgataacctgtatgctctctcagacagtcccgttttgctgggggagctgcaggcacttttgcagtatcaatatgaccgcattgattttattgacgagccggtagatgtgggctttgattgtccgctggacctgcactgcacttatacccgcgaccagctgctggtagcactggactttttgaagcctgctactgtccgcgagggcgtgaagtggctgccggaaaagcagctggacgtattctttgtgaccctgaacaaagcggacaaggattactcgcccaccaccatgtacaaggattattccatcaacgaaagcctgttccactggcagagccagagcaccaccgccgaaaactctgccaccgggcagcggtacatccatcaccgtgcaaagggaagccgggtgctgctgttcgtgcgcgagttcaaggcagatgcccgttttggcggtgcaggagcgtatacctatctgggcacggtgaactatgtgaagcatgagggctcccgtcccatgaatatcacatggaagctggaccgcccgattcctgcaaagttcctcaaaaagaccaacaaattgatcgtggggtaacatactatggacgatatgctggctcgcaccataattgaaactcttgcaaaaggtattaatcctttaaccggttggattctgtctgaaaatgatagttgtgctcaggaagaaattcaagaagcattaaaaatcgtattggaacattgctccattgaatctaccgctgaatatctgaagtctcttcctcgaaacaaaaaggcagagcgttattctcgcgctggaacagcatggtcgcaaaaagaagaacgtgaattattgcggctccaccagcaggggaacagcgtcaaacgaatttctttgattcaaaaacgttctacaggagcaatcgaatccaaattgagaaaactgggttgtccactctattatgaaaaataattcaggagattttcatgaaaatgattcgcgttgttgcagccgtgatctgcgacgatattcagacgaaacataaaatttatgccaccgcccgcggctacggcgagtacaagggcggatgggaattcccgggcggcaaaatcgagccgggtgaaaccccgcagcaggcactgaaacgagagatccgggaagaactggataccgagatcgcggtagacgatttgattggcaccattgaatacgattatccgacctttcatctttccatggactgtttctggtgcgaagtagtttccggcgagctggtgttgaaagaagccgaggctgcacgctggctgactaaagaggaacttgattctgttccgtggcttccggcggaccaacttcttttagcgcaaattcgtcctgcattataattttttatgataaattcctatctttagctttctcaaatttccatttttcacccagatataataatcatgatccaaagcctctgagtcgaaagactcaggggcttttttatgtctggaggtgagcattttgttattccgtaccatcactatcattattaccatcgtattttaaagcgcagctgcgcagaaaggagaaagcattatgaacttttggtccgaaatcgtcaaagaggttggcaccgtcctggtggaagtcctcgtccgcatcgctgaagaaatggaaaacaacgattgagcaaaatacactgaaaaggagactttactatgcccgcaaatgttgaaaccatgttctctgtccgtgagaccccttggcacggccttggccgtatcatcatggatgcccctgcaagccgtgaagccttggaactggccggtctggattggcaggtagagagccgtaatatctattccggcacgggtgctatgatccccggctatcgcgcaaatgtccgcagcaccgatgacgctgttctgggtgtggtatccgaccgctaccgcattgtgcagaacgaagaagcatttcagttcaccgatgacctgctgggtgagggcgttacttacgaaactgccggttctttgcagggcggcaagaaggtctggatgctggcaaggcttccgaggaaatatcttatcgctggagatcaggtagtaccatatcttgtgatcttcaacagtcatgacggcagttctggtgtgaaagtagccatgactccgatccgtgtagtctgccagaacacgctgaaccttgcgctgaatactgcaaagcgcagctggactgcacgccacaccgaaaatgttctgctccgcgtgcaggatgcccgtgaaaccctgcagctggccagcaactatatggttgaactcggcaaccgtggcgaagagctggctcgcatcgatttatccgatcacaaggtgcaggagttcatcaatgagtttttcccgatttctgaggacctgtccgattgccagcggaagaataatctgcgcctgcaggaagagctgaagactcgctactacaacgcaccggatctggaatgggtcggcaagaacggttggcgctttatcaacgcagtctctgattttgctacccacgcagatcctctccgcaagaccaaaaactataacgagaacctgttcctgcgcaccgcagagggcaaccccatgatcgacaaagcctacaagatggtgctggccgcagcataaaggagcaagccatgaatgatgtaaataaccgcattttcagggaattcacggaattttttgacaacgttgagaagagtgcttctgaaatcagcgttaccacggcttatgagatcacgatgaaaagtaccatcagcaccgccattattgttttggaatccgagggtagactggaggagcgctactggaaccatctcagggtgcaaaataatattctggattttctttatgacctgtgggttggctcttgccattcattggccagcgacttttccacgatcatgaaagacttggtggaatacgacttcattcttgccgaatctattatgaaagaaaggatgcaaagtgcatgaaaagattgatttctactttgaacctgtccaaagaagattggctccgttaccgtaagtgcggcattaccggcaccgatgcaggtgccattctgggtgtaaatccctatcgttctgcttttcaggtttactgcgacaaaaacagcgaaactattgagaacatcgataatgaggctatgcgccagggacgcgatctggaagattatgtcgcacaacgcttcaccgaagcaaccggtctgaaggtacgccgtgcaaatgccatctaccaaagtgaggaacatccactgcttctggcggactttgaccgtttgatcgttggacagaaggccgggctggagtgcaagacagtctcgccgttttctgcggacaaatgggctgatggaaaaatccctgcacattacatggctcaggtcaatcactatctggccgtcagcggttttgactgctggtacattgctgctcttattttcggaaaagagctggtgattcacaaaatcacaaccgacaaagaagttctgaacaacctcattgccaaggaagagcacttctggaaatacaacgtaatgcccgaaattccgcctgtacctaccggaagcgagggggatacacagcagatcaatcagctgtactctgtagatgatagaaacaaaactgccgatcttaatcccatccgcgacctgttggataagcggcaggagctttctgatcaaatcgagcagatggaacaggaaaagacggccatcgagcaacaggtcaagctgcaaatgcaggatgccgcctatggcacagcaccgggctataaggtatcgtgggtatcctccgaaagtaaacgggtagactcccagcgtttgaagaaagaacagcccgatattttcaatcggtacagcaagaatgtaagcagccgcaggtttaccattatccatgcagcatgatttttgtatgtctgctggcatacaaaattgcctgtttttccaattttgtttagtacggcaatacaaaattgcccgtttctctaactttgtttagtacagcaatacaaaacccggcgcagcaattcatttgttgcgccgggtttttatcagaaaggatgctatcatggaaaatccattcgtaaaattatttgctattgacttcaaagatcatctggaagtcaaaaagtccggcaacacggaactgaaatatgtaagctgggcgtatgcctgggcagaggtgaagaagctgtatcccactgccaactatgaggtcaagaaattcaacggcctgccctatgtttatgaccccataaccggattcatggtgtataccactgtcacgattgagggcgtttcgcacgaaatgtggctgcctgtactggatggcgcaaacaaagccatgaaagctgtgccttacacctataccaccccgaaatgggactacaatccgcagactcgccgccgtgaaaagatcggcatggaagaacgcaccgtagaagcagcctccatgttcgatgtgaataaagctatcatgcggtgtttggtgaagaaccttgctatgtttggccttggcctgtacgtttatgccggagaggatttgccggaagatgctgcaccgcagccggaggcagagccgcaaaagcagccgaaaccgaaatctgctaccccgaagcaggaacagccgccgatgccctgcatctgcgcccggtgcaaccagcccatcaagcgggtcaagctgaaggatggttccatcatgcaggcggcagagtttgcagccacccatgagggaatgtgcgctgactgctataaggcaaccagattgaacgtagcataataaaactgctctatttcgatgtcacttgattcttgtatgattctatatttcatggtacacttacagtagtgagttctgaaagctctcctctgtgagcggaaaggagcattgcatgaaagatttgcagtttcctgtcggaatctcgaattttgagaagattcgagaaggcgggtattattatatcgacaagaccaatctgatttctgaacttcttagcggaggtatcgctgaagtaacattgattactcgccctcgtcgcttcggaaaatcccttggtatgagcactctcgcaaattttctggatatccgcaaagacagcaagcaactgtttgagggattggcaatctccaaaaatacagagctttgcaaaaaatggatgaaccagtgtcctgtggtatttttctctttcaaggatacggacggtctgacctttgaaagtgcctatggaatgctgtgcatgaagctggcatttgcatttcaggattatcagtttcttttggatgacgatgctatttctgacgatgacaaaagcatctttaagcggattctgggacgcactgcatccatagatgaaaccaaaagctgctttttgctattgacccggatgctggaaatccatttcaaaaagtcggcggtcgtcattctggatgagtatgatgttcccattgcaaaagccagcagcaacggatattattcgcagatgctggacgtgatgcgggctatgatgagcaccacgctcaaagacaatacttcgctcgactttgctgttgttaccggctgtctgaaaattgccaaagaaagcatttttaccgggacgaacaattttgtttcggatacgattctttctccccggttgagcgaatcctttggtttcacacaggcagatgtaaatcaaatgctgaaagatgctggtcttgaatcgcagtctgctgaaatcaaggcatggtacgacggttatcattttggcgatgcagacatttattgtccgtgggatgtgatcagttatctgcgagatttccagtatggtgtagcacagaagccgaaaagctattggaaaaacaccagcgataatgctattatccgttcttttatcgactatgcaggtgacagtatcaccacgaagctcgaaactctgatggctggtgactctattgttcagcatattgaagaaaacctgacctacgattatctacactcctctgaggaaaatctttggagtgtgctgtatctgacaggctatctgaccaaggtgcgggataaggatctgacagattcgctgccggatggctgctctgcgctgatgattcccaatgcagagattcgggaaatttttgaaaccactgtaagcaaatggtttgacgacagtgcaaaggcatggaaccgcagcccgttgtttgatgcagtctggagcggaaacaacgaagctctgacaaaagagatgaccaagctgctgcgtatgaccatcagctaccacgactaccgggaggatttttaccacgctttccttgcaggcatctttactggtgctggctatgtggtagaatctaacaaagagcatggcgaggggcgcagcgatgttattgtaaaggatatccgcaatggccgcgtggcaatttttgaagccaagtatgccaaaactctggatgctctgccggatgcctgtgatactgccattcagcagatcaatgaccggatgtatgcagcggacttccgggatgactatgatgacatcctctgttatggcatcgcgttcttcaaaaaacgttgcatggtaagaaaaaaataattatctactggggagtatcttcggatgctccctttcactttttacaggacaatccatttggattgtcctgtttttatttggaggcacacaatgaaagaggaaaaaatcaaagtccttgcgctcctgccaatggagctgccaaaggagattgagctggacaacacccttgaagccatgcagaaatttgtaggcgggctgatcgaatgcatcacattgagtgacaccggttcagcggtcacactggtctgcaatgatgaaggcaagctgcttggcctgccgctcaatcgtccgctgtgggatggagccgatgttcttgccgggccgggatttctggccggatgcgacaacgaagggaatctgacttccctgccgcagagtgcaatggatttctacaaagagaaattcagagcttttatcattgaaatctaaggaggacagattatgacctttcatgcaatgaccgaacactacgaagagatcacggtttgcggaaagcctgcgctgttcaccagcatccgcatcaggagagataccatcccggatggtctgtacgtctacgatgtccggcacgatgatgagtgccggggcatcccttgtgagatcgcacccttcgtgatggtcaaccactggggcaccatcatccttgcggaaccgctggaactgccggatgatgggcggcgatatattgacgaggataccgactggaactacgctcctttggatggcgaggacaccgccaatcacaaaccgtgcacttccatttctgattttatgactgcctatgcccactaaagctgtattaaaaataccgtatattctgttttgtattaaaaccagccattttcaggccatttcaaggtgcaaaacacagtcttaaaaatgtcgctcgttatctttgagccagaaaggagcacaatgaacatctatggctattgccgcatctctacggcaaaacagagcattgaccgccaaatccgcaacatcaaggccgagtacccgactgcccatatcgtgcaggaagcctacactggcacatccatctttcgcccggagtggttgaagctctaccgggttctgaaagcaggagatacggtggtgttcgattcagtatcccggatgtccagaaatgcagaagaaggttttgctctgtacgaagacctctaccataagggcatccggctggtgttcttgaaagagcaccacatcgacaccgagacctacaaaaaagccctgtctggcagcattgccatgacagggacaaacgtggacttcatcttaaagggcatcaacgagtatctgatggccttggcaaaggagcagatcaaactggcctttgagcagtccgaaaaagaagttgccgatctgcaccagcgcacccgtgagggacttttgactgcccggctgaacggcaagcaggttggccgcaaaaagggtgttggatttgaaacgaaaaaagccagagatgctaagcagatcatccgcacccactgcaagaccttcggcggcatactcgacgatgccaagtgcatgaagctcaccggtcttgcccgtaacacctattataaatataagcgtcagattcgtgccgaactgatggctgaacaggatttgccgaaaggagcaagtatcttttatgaaccgccaaaatcattctgagccggagaacaggcttactttggaggaacagcaggagtttttgaagcttctggctcagctttccccggagcagcgtgaagcactgaaagaagtgctcaagtcctttacttaacaaaaatgtgcagggcggcgttgctgctaccctgcacatttttattttttgatttttatgctatcaacaatttaccattttcagcagcctgatgaactttttgaacggtttctttcgtttccttatccagaaccttattcatctcaccctccttagccttatccagaagatcctgcttagaaagtaccgagatcagcttgattgccaagcaagtcttttggaaattcaacttttccgctgctgtaaagttgacgtactctgttgtgcgctccacagtcttctctgcctgtgtaaccagccgcaaataaacatcatacaactgctgcagctcgtcctgcacgcccttagataaaagtgcaagccgtttcagctcaatctcaatgtcttgcatcttgccaacagccttaaatgtctggtactcaatatccttagcgttttccagaactttatttcctttgatattaaaaaggattccctctaccataagaagcggtgcagctgtcaatcctgtcaacaccgcctggccgcctgccattccgaggccacctgcacttagcgcgccaccacccagctgagccaatgttgcgtttgttgctgcagcaccagaaagagaggaaatagccgtacccgttgaagcaaaaatagccatacttgttgcgccgctttgcgctgcaaatccagccagcatacctactgcataacctgttgcaccggtttgcatcgcttcctttatgcctattccaagggtgcgaaattcgctcaaatcttccggagttatcgacaaatctccttccagcgcaacttcaccgttcgagtttggaggaagttttactttactatacatctcgcagaatctcggatagccttccccccaagccttaagtttgagctgtccaagctcagacaagcgtttattggtctcgtcttgagtggtttccagtttttttctttcattattgtagagactctgtgattcatttttgattttagaagccttagcacgtttatttgcgccagaggctgcattcgcagcacccactgcgcccgttgtcgcaattgtaccaacggcagtggctcccgctgttcccgcagttgttcctgcgaccgccgcaatatttgcagcgacaccaccaatgattggagccgcttctactgctgttgccgccgctccaattcctgcaccaactgcccccattgcgcccgtaacggcagttccgactgctgtggatgcagcagctgttccaacagcggctgcggcgccactcactgctgttgccgctgaaacgactgctccgcctactgccgtggaggcagctgctgcgcctgctgcggcaacggctccactaaccgcagttgctgcaccggcagctaatgcgcctgcacctgctgcagcagttcccacgccagcagccacggttgccgctgctccggcagcagcggctgctccagcggctcctactgcggcagctgcgggcagtacaacgggagccgcaaccactgccactgcacctgcggcgactgctgcaaaaattttaccaagtcccataattgattttctcctttttatcaatcttcaaccagcatgtcaccctgttttttccactcaattccatcctgtacccatttttcaagcgcatggacacgttccgactctacgccaaactcttttgccagcttcataatttctttttgctcactctcggagtaatcattatcgaccatacagagctgcaacgcctcccgcaaaaagcagagagcttcttgccgagatgcaaatgtcagagggatttcctttgtctgcgtcattacagctggcaggattgcaatatcattttccggaattccaagcccccgtgccgcatcaataaaaaatatctgctcttccgggctgatttccccatccgctttggaaatccggatcaagcccttgacaaagttcatctttgcttcggtcgtttggaaaagctgttcgtaatacattgtgcttcctccttaaagttccagaacaaattcatcgtccatcattttttcatcaaactcttcgctgctatggaattgcatattcacccccatttcgttgagtttctgatagatcttatctgtgcaattctgtttgtcgtccagcaacccacttattgtgttgatttgtgcaagctctttttcatacgcatcataatcaattgctcgcagcacctgtagttgccgattcagttcctgattgattttctctatatatactgcaaggtccgcatagcttaggtcatatcgaatgatcaactctgcaagcgcacgctttaccagtttataccacgcaatcaaattcaggtgcataaagaaaatcagcatatttccgccagaccgtactgctgcatccacgccatcaacaatacagagcgtgccatttcctaccaacaccatcattcgcaagtctggttgtttgtcagacggtatgcactcagaaaacggctttttatctccgaagaacctacgaactgaccagataaagcggatactcaagtcacatagcaccactggaattgccattgtaaggccccatcgcgcatcatatcccctctggaatgctttgatagctagctctgccagtgtactgctttcaccatcaatctggaagttaccaaaatcacacaatccaaataactcataaaacggaatcacaataccgcttcctcgcccgctatttgaccttgccttactacttccagccacatccgacatcaggtgcccaaaccaatttactataccgcaaaacaattttgccacaaaagtatgtccttgtagctccatggtatctgttgctatcgtaattaatctaccattgctttctgttttacaagatattttgttgcccctgtcagctttttgttttcaaaatagaagtcaaataatttttcggttcgtaggtaaattgctacatttgcagcgtcctttataatatgacctttggctgcgccgatgaccttttccattttcttttccaattgttcctgtgtttccggatccggagcatcttccaaaaacacgtcatcaaagtagaggcttcccttttcttccggaagctgttgttcttcacgtgtcagattcaaacattgcggcatcggcaattcctgtgcatcacaaaactggagtaaatcattttccagaagatttagtgtgccgagttcctgagagtttacaatttcatctgtaactctcgctttcaacttgtcaaaaaacacttctgtcagccgttggtacgagaacagttctgtaagcttctcatagttttcctcatcaaaggtatttgttgtttctttctgtagattttgaactgctggtctggtattccgcaacttcccttcaataagtttaatcagcacctcgcgtttttctaaatcgcggaaaacaggaagtgtatccagccctgcaaccattcgattcagctggacgacacagtttcggctgtattttcctgtaccaagtttggaaaccaaaagtgcagcattttcctttttatagcaagatttttccaaatcctgtagtgcgtcctcataatcatctcttgtttttcgtgcatagtcctgcagtgtagtgcgatatgctttgatgagtgcgaccttttgccttttaataaaggcttcctccagcgactggtctgaaactgttccttttggcatcgggaagagaaactccggcgcaatccttctggcaagtattccgtactctgtatatgctgccggactttccgttgcaagatactggctaacatagattctgctcagaatctttgcattcatagccggattgtattcttcattaacaagatatttcagcagtctggcggcatcttcggtctttccaattttgaggtacgaaattgcacacagctgcaaaacatcgtttgcattccctgcctttttctgtgcttccataaccagctgatatactttttcggtgttttcttttgcattctccagcagcaaaagatccgaatactccagcaatgcagatgcagccagctgatcttcccgcagcaaactaaagcgattcagttgataatatttttcaaagtggttctttgcacggttgcgatactccgcttttgccactgcattggtttcattttccgaaatatatagtgccgtgtgcgcatagaaataccagaatggcgggtatgcttcaaaattgggagcaattgcttccaaccgagcgtatttacggtattcgtctgcatccatcaatacttgatcatattgtttgatctgattttccgtcaaacgccattcatccttgaacccatacgaatctacaagtcgccatgctgttgtgaacaattctctttgtaatgcgtgaaactgctccatcgcggtgatttgaagttcaaattccgaattttctttctcaatccctgcattggccttttctctgcggtaattcatgtatgctgttccgacttgagttgccactgagagtaccattgcaatcggatttcccgccacaatcacactgaggttcggaaccgcagaccaaattgcatttttcatgcgtcgttggtaatcgctctcaactttttgttttttcagttcttgaattctgaaaaacgtgatcgtattcagcgtctccaccagaatcttcaaaagtgcttcatcttttggcatagcttccagattcaggttgttcagaatagcattatactcctgctccaaaacataaacatcattgtagtctactatctgggaaatagaaaccgtgcacagattaagtgcataagccgctttgcgtttttcgtcttctgaatacacttgtaacttctgcatatcattcaccttttataaatccacttccatcataatcggaagatggtctgatatttctttccggtaacggtcaaacctctgctcctgcgtaacgtcttcagattttgtatacttgttcacaaggtctatgctatgaatgctgtccatccgaacaattcgtcgggttcgctcatcaaatgaaaaatgatcgtaattatttgcatactccggggtgtcacgctttattgtacttgcatcagtctgatatgtataaatgtatgcttttgctctgctttcatctacgggctttccctttgcatcgaaacaggcaactgccggaactgccggataggctcccaaattcaggttataatctccaagcaaaaccgtataaggcgaagtacagtcctgaaccttataatattctgcgacacgtcgatacaactgtccggccaaaatatcgaactctttctgccgcatttttgcagcactatagtcaatcacatcattgagcgctcccgattttccatatacgatatgggtcacaagaattctcagttctgcaacatggcgatctttcaataaaaaacgcgcatataatggatctcgaatcaatcggagttgactttctgcaatcaccggattgtaattggaaagaatttccggtctgtatggttcgccccagcgtcctagcggcaaatcaaacttatccgttcgccagagaattgcatacccctcaccacgtcggtcttcacctcgaaatggctcgttctctcgtgacaaaacgggctgcgcccattggctgtcccatggcccactcaagcggcgtttcaaggaacgatcataagcctttgcttgccctgatggctcttttaagtcaattcctccaataacttttccttctgccaaaacctcctgcagcgccacgatgtccaaatgataataatttatcattttggcaattctatccaaatctcggccctcgccatctgcaagattccgtacattaaaggaaccgattcggattctgctcatacatcctcctaagattttacgtcattcgttcctgcattctttgaatttcagttttcatctcctgcaccagtgtttccggtgcagtcaccttgaccttgctgccttgactgagcagccacattttcacgccggttccaaagacttcggcttcaatagagcagacaccctctttttcatctacgacttttgccatggggaacttgtccagcacagcttccaccgatgggccatagtagttgaagcggatgttctgcggttcaccgccgaacatgaactgagtgcggttcttatactcgccctctttgaagcggtctttgtaggaaacagaaaacttttctccggtttccttgatggaatgtatcctatcaagccggtaaatggtgggataaggatcgttctttttgtggaaagcctctctggtggagtggtctgtgataacagccatgagatagaaataatactctgagaacatcaatcccaccggctcaaccatccgttttacgatttgacggtctttcagcttctgatactcaatttccagtaccgactgatttcggatggcctgtgccaccatccacagattgtccgggtcaacggttgcatgagccgggtcgtgatagtggaacagttcattgctgataaaccactcaatgtcgcttttttctttctgagacacacaaaggttcaggatgatttgcaactgcttctcgacctgctctttggtaaaagctcggctttccagcagaatcttgcatagggccaacacttcacctttggaaagctgctcgatctcctgtgtgaccagacggtagccattttctttcttgtcgtactcgatttttcgtacgattccttctttggcacactgttccgaaagaaaatcccggatgctgtcgatgtctctctggatagaacgggcgttcacatggtactgctctgcgacctgttgcttattgatgagcttaccagaaagaaaatcctgataaagttccaaaacacgggtcgtttttaaggtgtctgctgtcattggtttgccctcctcttcggttcagccccattatagcaaccgtggtggacaggcattgtctatcttcttctttgtctatcaaaaagtttttggttctaaaatctgtgcgagatttctaaaaagggtttgattgctacgatatatactattgaaagtatacgactaatgcaattaacggtcaagccttggaacaataaaatcgtaagtaatcactacgatttgtacaaggaggtcaaccatggagcgagagaagcctacatttgatattttagggcgcattgaacaggaacgcctttcccgtggctggtccgagtatgcccttgcagaaaactccgggctgacccaatccaccatctcaacatggagaagaagaaatcttcagccgaatgttgcttctatcgagaaaatctgtgcaggcttcggcattaccctctctcagttctttcaggaggaggactcagtttatctgacgaaggagcaaaagaagcttcttgatctctgggctaaactctctcctgctcaaagagaagcagtcactaaaatgctgtgtgctttcctatatatagaggaagaaccctgagtttcaactgcatattgccagataaaagcggccaagcctcaaaaagcttgaccgctttatccttttgaataatagggtttaggtacaggattcccggatttttgccagatcactgttcagcagcgtttcatgttccagaagctctttctggacagcaagcaggaaatctctgttgtcatagagaatcttataggctctgcggtaaagttcttccagttttgctgatttaattgcttcattataggaaagtcttggttcagacaatctattttcgctaggttcaactcctgaaaaacctccaccagcaaagtgacacagccagatatccagaagctggtctgctttcttaatatcagccgctgcacgaatgtccatgattccatagatcaaagcagttcccgccttgcctgccaaggtttttatgatcccatcctgaaattcttcttcactcttagcataaacagcaaacccactctccataccaccaatagcaccatgacttccgcgaattgtaataatcccaatgctaccagaatgcagaacctctcccacaacagcatgcgcagcctcgtgcacggcaatcatctggtgttcctgcgaatcatcctcacagtccgtttttctgagattatagaccacctttaaaagtgcatctataatgtcttccttctgaacatgtgcatgatcacgatagacactattgattgccgcgagattcattgccgtttcaagcgttgcacagctcacctgcggcatagcctttacgatatcagagatctgtacatctttcgccagatttttatcacgaagataatagcttacaatgtcttctgccgttttaccaagtggtggattcaaattcagaatatagtcaaatcttcccggtcttaataaactttgcggcatgtaccttgtatcatttgtcgtggcaattacaaagatatccgcatcgcttgtctcgtcaatacaggcttgtaaacaagcccattccggagcatagggagaattggattccacataaaggttcagatcttctaagagcagtatactcggtgcctcttcttttgcaacgtcaaagatatctttcatctcacccagaaatgtatttccttcgttgatccttcgaaagacgaaggattttcgtccagactcttccatcaatatcgatgccatcaggctctttcctagtccgggggcagactccatcagaagtcctcttggcatggacacccctttttctttataagtctccggccgtttaagaacatctgctatctgccgcagcgtttcttttatcgaatcgtaaccgatcactttttcatcaaacttatccattgtgctatctccttttttatttacctattttagctcgtctattttgcaccatttgaccttttgcagttatcggaacgcttccgtatcgaacgatatcgtcaccatacaatgcagcttctcttgactgcctcatttggatattattttgaagcatctcgtcgaactcagatttccactgatttgttactgacacgagcatttttctctcagcttcccactgaatatgaaacatactctgtgtttgaaacgatactgcacaaactgcaaaatgaatatgtacattaaatctatccgcatgaattccgtaagctgtaataaagccattccttgcatagatacttgctattctttctgccagagatactacatcctgtggcagaatacaatccgttgccgcgaaagaaacaatgcggtgttttgcaaactgcggaatacctttatgtcttctcctgacttcaaaaagcatcaggttataaacggcacttgggtcacacaaatattcattgggaatcatcgctggctgacaacctgctaaggtatttgttatagtattcgctctttgactatcttctgctgtcttatctaatctaagaatatattgcaataaatgttttaagtcctccaaagtttcatacttatcatttttgagttcgatataacacatacctatgaacctcctcttttactccttcccaatttttttcactcgcataattcccaatattagatatgatttcatcaacaaggtctgcatctatttcagtaaagtagattgcactcttaaatacttctgttgcttttttaccagtttcatccattctctgttgtagatgaattttatcttcagcggtcaatcgtatattaacagtatctcccattataattgccttctttctatccatagagtttcatgcgaacaaattcagaaaaacaaaaataaaaaattatttatgacggcatccgcctcccccctagcaagaatagccaaatgtatatacactacacattcggctgttcttgtgcgaccgtttgtactacaactattccattcggccgctttattctaatgttagtgcctttaataaagatcaacttctaccttccttctgctccatgcattatttagcattaacaccggattatctacatgtgcattcctctatcaaacattattttcaagcaacagaaaacccacatggagtcattatccatgtgggcatttttcgtattaccatccagtagctttcatatgagcttcctgcacaatatattcttgtactgctctcttaggaattttccaaactcgaccgatcctcatagcttttatctttcccgacttcaaaagcttataggtggtgttcataccacatcccagcatatcggcaacttcttccggggttatcagggtatcgtaataatcaaacataacggcaaatcctcctttgatggtttactatactgttgccgaatgtcaaatcataccagatacagagaaagggcaaccacttgcgtggttgccctaaattggtgtcataatgctataatgtagccttcgttcctacacttctgaaaaaattttggttggaacattcccattttcctggtattagggaacatttaatgctgaatttttttcagaagtgtaggaactactaataatcatagattctccacatcgtgccataaaactcttccgtctttcgtaaggctgcattttgcgtcaaaacgcaaaagatagctgtcgcttcctcggtaaccttttagctttcccaagtccacttgcatgcaaatagttccctcccaaaatggatcacgccttgctactaaggcatttagaagtcctactatgcctccatacgttatttccgtctccgctttttctttagaattttcatttactgatataccattacctttcaagaagctttgcattgtctttggatttttacttcccgataaaatctctatttctcctttcgtcggaatcacttcaaattcaaagtctcgtgcacaaaaatccttagccgtttttccaaaaagaagcagaaattcatcccatgtttctccgtctttgaaaatgtcaaatactattccatcttcttttatttttaatagtttatgcgcatccatctctttcaagaatttttttgctttttctgatatacttcctgacccatttttaggccattatgactaactatcctccttatatcaacttgtaattctgattgaaagcacggctttgtcactacttgttttattccttttaattttccatctttgactatataaacgtcctgatttttcattagcggaagctcatccaccatgctcatttgtggaatcacgtcatagtctaatggtgcattatatattgcgttccgattcaaaaagcaagcatagactacttttacaatttcatttaaaacgttgatttttttgttgctttctttgccttcttcattttctttattttcttggggtttctcatctaaaaaagcgaaataatcttcccacacaaattcagtatatttttttaaaattccatatgcttcttgtattttctcttgctgcgtagcttttttctttcgctcccttaataattttgcgccagcatattccacaagagcaaccgtgaccattttgatatacctgcaatacttattttttattgtaatatcatatatctcttctatttttattttgtccaaatagaacgccactggaagcgatgcctcacgtaatattctcagctcattttccgagatatgcaattttttattgttatcttcattttccaagagtagttttagtaatttgcaatggtataaaatctctctagcaaaggccagagttatcatttcactgtaatcacactgtgtaaaatcaatttttccgattttttctatcgccttatataagtctttgcaaatcgtccttacttgtttcctttggttttttgttattgcttcatcgaccaatacatctttctcttttgccgctaaacgcaaaatattccagcttactgcatgacgctcctcctttacaatactttcgactgctttttcaaataagggtgtcaaaaaatctttacagctcttatttgttgatattggaggaataaactcatatggacaaattaactctgcaaagaaatccaaaccgttctgtcctgataacggtctcatttcttcaatttcacgttttttctttcttaaggctttgagtctattctggtaaatagaaaagctaccttcttcatcctctgtccatgcaaaaagtttcttttgcaaatccacactttttacttgctgcgccgataagtaatttaatgacgccaaaacacaaccaatcgtatttgcataaagtatttttgcagcctctcgcgaatcttcacagcataaactgaaaatccatagaattgaatcctttttccccatatccgccagtatatgtgcaaccgccgagtcatcatcatgtgacagcccctctgcgtcaagtccaatttccaagcgtctcacatacgactgaaaactgattccaaaaatcttctctatgcttttttccgtttcgctcaattctttttcatttttaaaaatcacaaggtcctcaattttgctcatttgcgccatttcctttctggctctgaaaaaacagggctatatttttacactttttcattttttggtatcgaaaagtcttctcgcacatttcgcagccgggtatacaatactttcggaagaaagccttcagcctcttctactccgcaccttgacaactaaattagcgggtagcctatccccggaaaacgaccggacaaactgctcgcagtccgccatcacacaatatagaaaggagcactctccattatgaacaatcaaaaagaccagcagatgaagcaagccgtctattttatagacgatgagccaacagatatgcgctccacagaagtctcctctaactcaatgcaaacggtaattcctaattctataccacgaacaacagtgcaaaaacagtctgattcacagcattctaattgcactactaccgttcctgcaaacaagtatgtacgcaaatctgcactctcgaatcagcggcaacagccagttgctccgccttataaccagcccgttcaacccacaaacgtatatcaacaaccagctgtgtcagctccgttcaatactcaacaccccatttctcaagacaatcctatcgaaacaaccatacaaaagcttcaagccaaatgggtaagtgattcccaaaaggcttatagagagaaacagttcaaatttgataattctgccttagcccctgattctcaagggtgtttaaccgtctttgacaaaggtataataataaatcacaacaaaaaccgagccaacctacactaaaacgccactttttgtatcaacaaaaggggcgtttttttcatggctcgacagggaaaggagtggtatcaatcaaaaattaaaaatggaaagggggaatatttttcgctggccgggccgtatggtctggccttttttcatgccacaaaaaaggaggttagcgaatggcagatgaaacattgaacaagggcccggagggagaaaagcgcccggagtccccagccccggatgggcccggcgcaccgcccgcgccggaacaggccgaacaggtgacgctccccggtatgggcgagggcggccctgctccgtctggtaaggtcatcaacctgtcggatgtgcggggtgatgatgataagggcggcaaggctcccgccgttgaagcggaaaagccggaaaagcgccggggccgtccgccaaaggaacaggcggagccgaagtctccaaaagcggaaaagacggccaagccccgcgcaggccgcccacccaagggggacaaggcggcccgcgccgaggctcagccgtccacgcgagacaaagtgtcccaaagtaaaaagaaaaccccggaaaagggctccggcgggatgggcccgcccaagtctccgccaaagggcaaggccgggcccgtcaaagctgcggcggcccctgtcccggagatcaacctgccgcctacaccagccgagccgccccgcccggttgaggagggcaaggttgtctatttgaaattgtccgagctccatgcgttccacacgttccgggagcatccctacaaggtgcaggacgataaggcgatggatgacctggtggggacgatcaaggagcatggcgttatgacccccgccaccgtccgcccggaaaaggacggccagggctatgagatcatcgcgggccaccgccgtcatcatggcagtgaacgggccgggctggatgaaatgccctgtattgtccgcaacatgacggactttgaagccgtccgggaaatgcggaacagcaacaaacagcgcggggagcccctccccagcgagttggcccgcctgctggatttggaggtggaggctatcaagcaccagggggcccgccccggcaacagccaggaggagcaggccctggggaaacgctctgttgagattgtgggtgcggatcacgatatgaactataaaaaagccatgcgttatatccggcttaattctcttgtcccggagctcctggatatgacggacgccaaaaagctgggctttatgcctgcggtggagctgtcctatatccgcccggaaaaccagcgattgatcgctgtttccattgagggggagcagtcctccccctcggtcaaccaggccaagcagctccgggagcttgacaaggagggcaagctcaacggcgatgtgattgacgggattttgagtgaagaaaagaaggaggatcgcggcgtgattatttcaacatctgaactgtcgaagtattttggcaaggaggtcactcccgccaaaatgaaagaacagattatggccctgctggacgactggaaagagaaacagccgcccgaactggcaaagccggagaaaaagaacactctggaaaagtaacggggctttgcttcgagacactttgtcccaaggtgccgggccccggaaaagcagggctctgtggtgatatatcccccgtcgccggggataaaaaagcacagtcggaggtgggctgtcaagggggcggaacgccccgccgcttgcggtggcttgcccttgacggcctgccccggctgtgctatctccggccacgcggcgggggtatatcctccagagccgctccctttccctggatagggaaagggcggggggatagggttgacccggcccaacaattcagttacggaggttttgacgatgaaacgaccccttgcttatattaccgccgcatggtgcggcgatgacgatgacaatatggaacgggcggcgcggtactgccgcatcgtgtacgaggcgggcttttcgcctgtctgccccgcgctgtatctgcccctgtttctcaatgatgcggtgccggaggagcacaagaacggcatcgacatggcccgcgacctgctccggcgttcccgtgtgctggtggtgtgcggccactctatcaccgaggcgatgaaaaatgatattgcggtggcccagcggctggggatcacagcgaccaccctggacggcattttgacggtcaagggccagggccgccactaacgcgccgggcccagagaacggcggcacttggagacactttgtcccaaggtgcgccggggaaaggagggatatagctggttggcgaggatgtttccagacgtaccatagcactatccataaaggccagcaagctgacggcgcgggtgctggcccaggcgctccaagcggcgggccgcaaaattgcaaagacccgccgggagcaccagacgccccacggcaggcaaacggtgcgccagctcatggcccacggagccgccacaaacagcattgaaattgaagctccccggcagtttgaccgggtggcccgccgcttcaatgtggattatgccttttataaaaccgggccggacaaatacctgctgtttttcaaaagcggccaggcggacgcggtgacagcttgcttttctgaatactccaaacgcctgttgaagcgttccaagtccagccgtgtccccatccgggaacagctcaaacgggctgaggatcagcttgcaaaggaaaagccccggaagaaagaacgagtaaaggaggcggcccgtgaggacagataaactcaaaaagtatttgatacctaacatcccctatctgtttatcctgtgggcctgtctgaaactggggacggcctaccggctggcggcgggtgcggatgttgctcataagctcatggggctgggccagaccattggcccggcctttgccgactttgcgccggggcttgctccctttgactggctcgttggcattgtgggcgcggcggcgttccgtctgctgatctacacgaaaagcaaaaacgccaaaaagtaccgccgggatgaggagtatggctccgcccgctttggaacggaaaaggatataaagccctttgtcgatcccaagtttgagaataatgtcattctcaccgggacggaatttcttaccatgaacacgcgcccgaaaaatccggccaacgcccggaacttgaattgctgtgtcatcggctcgtccggctccggcaaaacccggttttggctcacgccccagcttctccaggctcattcctctttcgtggtggttgatcccaagggcggggtgctctcccaggtaggccgctttttacagcggcgggggtataagatcaagatttttaacagcattgatttttctaaatccatgcactataacccgctggcctatctcaaaaacgaggcggacattctcaaatttgtggatacgctcatagccaacacaaagggggacggcaaggagggcgatccgttctggacaaaatcggaaacgcttttgtattgcgccctgctgtcctatatcattttcgagggccccgccgaggatcggaacatgaatacgctggtggatatgatttccggcatggaggtcaaggaggatgatgaaaacttcctaaacaccgtggactatatgtttaagggcctggaaaaacgcaagccgaattgctttgctgtcaagcaatacaaaaaatacaagctggccagcggtgatatatgctctaagtgacttcttaatcatgattttgtcatggttagtgaagcaatcacttagagcatttttgtttcaggaggtacagccatgagaaatgaaaaaattaccccactgtacgagcgcctgagccgggacgacgagttacagggcgagagcaattccatatccaaccaaaaacagatgttagaggattttgcccgccggaatgggctgccaaaccctacgcactttacagatgatggtatctcaggcacccgttttgaccgccccggatttttggcgatgatggaggaagtggaggcagggcgtgtagaggcaatcgtcatcaaggacatgagccggttggggcgcgactatctgaaggtcggtcaggtcatggaggttttgcggcaacgcggtgttcgtctgatcgccatcaacgacggtgtggacagtctgaaaggcgatgacgattttaccccattccgcaacatcatgaatgaattttacgcccgtgataccagcaggaaaatccgttctgtgtttaaggcaaaaggtatgagcggcaagcacctgaccggcactgtgatttacggctacttatgggacgaaaaacgggagcattggctggtagatgaggaagccgccgaagtggtacgccgtatcttctccctcacgctggagggatatgggccttatcagattgcctgcaaattatccgcagatcggattgaaattcccgtcgtacaccttgcccgcttcaacgagggtgtgaaccgttcaaagccggtcaaagacccctatggatggggatcatctaccatcgtgaacattttgaaaaaacgagagtatttggggcacaccatcaatttcaagacccgcaagcactttaaggacaagaaaagccactatgtttctgaggacgagtggacgatctttgagaatacccatgaagccattatcgaccagcagacctttgatctggtgcagaaaatccgcagcaatgtacggcgttatccaaacggctggggcgaagcggctcccctcacaggcttactctattgtgccgattgcggcggcaagatgtatgtccaccgcaccaacaatggcaagcggatttctcaatatacctgttccaattataccaaagttccgtgtgggacactatgccctacacaacaccgtatcaatgagagtgctgtcctgacattggtttccgacacgctccgggctatcgctgaatattcgagaaatgaccggacggaatttattcacactgttcaggagacgcaggttgctcaacagagtgccgatatatcgaaaaagcgcaggcgtctggctgctgcccaaaagagagccggagaactggaaaaactgatttgcaaaatctatgaggacaatgccctcggcaagctgccggatgcacgatatagggcgcttgatgcacagtatgccaaagagcaggacgcacttgagattgaaattgcggagctggaaaaggctgttaccggctacgagcaaagccagaaatcagcggagaaatttatagccctgattgataagtacgagaattttgacacgctgacaaacaccatgctcaatgagtttgtagagaaaatccttgtccacgaacgcgccagaaaaggtagtcaggacaccacgcaggaaattgaaatctacttcaattttttaggacgctatatcccaccatccttacagccggttcctttaaccccggaggaacaggaagaactgcggaaaaaagaagaacgcaaggacaggcttcatcagaattatttgaagcggaaagccagcggcgcacagaaacagtatgaggacaaaatcaaggcgaagaaaaaagcggaaatggacgctaagaaagccctgatccgggctgaggatatgaaaaaaggtgttttttctactatcggtcagctaccaaaagaagaaccgcgcaaaggcagcatagcagccagcgcagcagtctaatcatcacgaagcaaaggagaatgaatatgagtaagttgacttacattcgttgtggagattatgatataccaaacctaaaactttctgaacagccggaaacttctatcggcaagtacggcagaatgcgaaaatcctacctaaaggaacatcgccccattctctacaaccatctgctgatgagcgagaagctgtatccacacctgttagagattgagcggacagcacaggggcgtgtggaaactatgttgcctcacatgatggagactgcgggtgtcacggaagaactgaaagcctgtgaccccatgcgttgggtggggctgatgaacacattaacggcacagattgaggaaattttaatcagggaactgatttgcagctgaatgggaggtgcgggaaatgctgacctttgaaaagattttgaaagtgtttcaggcatatctggatgatgatcctctgtatgaggtggttcagaccagccacggttatacattgatggcatgggaaccccaccggaatgactggtacagcgctgaaatacagaaaaccccggaggatttacggaacgctttgttgggtacatacgccaactttctggaagataagattaccggaaatgaccgtgacctgactgtgacagaaaccggagaaatccagcagaggtgccgggaacttttggaaaagtgccgggaaacatgatacagaaacgccagaaggaggccgcgattatgcgtcctccttctgcttcgcagtctgttccattttgagcgccccgtctatggcaccttcgataatcggcaggtattcttcagggcaaagcttcagcttgtggctgacccgttgccgctgttcgctttcttctcgtataatctccgggttaaaataccgttccacgggaagtccgcagaccttaatcaactggatcatcacaggcaggctcggaatcgcaccttgattctcaatgttggcaagataccgccattcaatcccaaccatttctgccaatgtttttcgtgccagacgctttgcctctcgtgcagctttgacatctgcaccgaaggtttcaaaaccgggacaatcttcaactttcgccatataacatcacccagttacattgtataattcatacttcgcccgtggaatgttgctatatgcagattggttgaagtttataattcacatttcgttccttgcattgttcgagaaagagaactataatgtactctgtggaggtgcgaaatggactatatgacattgaaagaggccgccgagaagtggggcgtgacacctcgtagggtaaattattattgtgctggtgggcgtatccccggcgctgtgaagatggctggtgtttggctgatcccaaagaacgcagaaaagccgactgatagacgcagaaaggagtttcaacatgaataatgttttaattatcgaagatgataaagaaatttgcgttatgataaaagaccatctggaaaagtacaattatcaagtcttcttcacacttactggtgcaaatgcgattgaacgtataaaagaattatccccggatttaattattttagatttaatgcttccttttatcagtggagatgagttaattagaaatatcagaaaattttcagacgtacctgtaattgttgtttctgcaaaaagtttaacattcaacaaagtcgaactgctacgcttgggtgctgatgactatttaacaaagccgtttgatttggacgaattactagcgcgaattgaacgcaatttgctaagaagtcaaaaagatactcccaatctttgtttgacctttggagaactttccattaatacatcttcaaaaatagttactgttgcagacgaaattattgtgcttacagcaaaagagtatcaactcgtagaactactggcgaaatatcctgataaagtcttttctaagcaaaatctttatgaaagtatttggcaagaaccatttgcaagggataatgatgtcattaacacacatataagtaacttacgaaaaaaattaaagggcgaaggctgccgaattaagaccatatggggcttgggttaccgatttgcaaagtgagctttagataatctttagctttacctttagattattcaaggaattgtctgcgatactaaataacaagaaaggagctgtgaaaatatgaacgtaacagtttttgaagctatcaacatcacaaaaaagtatcgcaatacactagccctaaatcaagtatctatgtctgtaatgcaaggagatatttatgggtttatcggagaaaacggtgccggtaaaacaacaatgattcgtttactaaccggactggcggaacctactactggcaaaattgctttattcggtgaaagcaataagaaacttgcaaagcagcgtgagcgcattggctgtattattgagagcccttctctttatcttgatatgacagcctatgaaaatttggaggtacaacgtttgcaacgcggtattccaggaaaaggttgcattgataatgctttagcattagttggtttgaaagataccggaaagaaaaaagcaaaagatttctctttgggtatgcggcagagactagctctcgcaatcgctttgcttgggaatcctgaatttctcgtactagatgaaccaattaacggactagaccctactggaattatcgaattaagaaacttactcaaaagactaaataaagaacgtggaatcactattttgatttcaagtcacattctcacggaacttcatcaattagcaaatagatatggtatcttacatgaggggaaacttttacaggaaattaccgctacagagttagacaaacgctgcaaaaagcatttgttgttgcaagtgaatgatgtagctgctgctagtgttttattggaaagcaaactgaatacttcaaatttttctgttatgccagacaaaagtattcatctatatgattatgttgaaaatgccggaaaagtatcagcgttgctaagtgcaaataatattacgatttatcagttagcacaatctggagatagtcttgaaacttattacactaatttgataggagggtgccaaaatgattaaccattttaaagctgaattttataaattgcgtcactcaaagatattgataactatattaggcgtatgtgcggcggttataatggtctcttttgcacttggtgacatgactttttttggagccggagatggaacagaaagtgtaatcggatttcaagctaagtgttatctatctagtgaaataccaacgtttcaaactgttgcccgctcatctcttgcatatacagcctttttctggattattggcattttatttgcaaccatattttttacaaaagaatataatacgggtacaatcaaattatctgttgcatacggcactaaacgaactattctctactacaccaaagcgattacaatattggtggtgtctctgataacgtatctgatttttgtagctacatttttcgttattgaaatcatacaatccggttacattccaactgcgagtgaagtaataaaccttttgggatgggctcttgcttgcggaacggttttattagcattagaaagcatttctatttttttatgtgtcgttattcaaaatacagggattgtaacagggatttgctgcttatatgtattcagtggagcgtctgtttacttaatgctatggagtgatatggagccggtttcaatacccttaaaattttttgtatatggaaatcctatgtactattggatgaatttcagctcttgtcgcacaatgggtattattgagcatttaccattctatttcatagggtgcatttctcttttgattgttggcggtcttattatgattagaaaagaaatcaagtaaaagggaggtagaatatgggttgggcgattatgtttcttgttctgatagcattggtcattatcctttcaatttctttaattaactggaaaatacagatatataaagtaatcgtccaactaaatgctattctgaatagaaaaacgaaaaagttagttacagtgtctttatctgataggcggttagagcatttggttgaaatcataaatcagattgtatcaaaagataatatttatctgggcgaaattcaaaaaaaggagaatgaattaaaagagaatatttcttgcctttctcatgatttacggacaccactaacttccattcgcggatatttgcaacttctatcaagtgcgcctgatgaaaaaagagcggaatatatttcagcattatccggaaaagcattgagattagaacgtctcatagatgacttttatcaaatctctcttttagaagcaggacaatatccattttactatgaaaaggttgagctatgctcattgcttactgaaatcctgctagacaattattcgattttcagcgttaatggaattgaaccccaaatagaaatacctaatatggacatctatcttaatgctgacagaaaggcgtgtattcgcattatacaaaatcttatattcaatgcggtaacatccactacaaataatgttgtaattcaactaattaatattgcagattctgtacaactctgtattaaaaatcctgttgcatctattcctacagaagaatattcaaaactgttggaacgcttttatgtagcagatgtttcaagaagtaatggtacgtctggacaaggactttacattgtgaaaaagctattacttatgatgaattgtacaaatccaataattgaaatacatgaccataattttatgattacgattgatttttcgcccttactcataaaaaaataatctgccggacgacggcaaaagaaaaaaagccgtcgtaaagcagatctattaacgcgcctatgctatcttccggcggctttgaaaaaacagagccgccgtttctttttgcgaaaagcagaaacccgacgacctaacaccgtgtaaatccacggcggcatataggaggattgccgccgtgtctatgcttgccttttttcacagtacccatgacctgcaccagctaaaaaaagtctgttcccagcagcggagcaatgcggtcagaagtatgcactataccatgtaactaaacagcaaaatatactctattacgctcgtatggctttatgccgtccgggcgcttttttgtccctgtggagccggaacatcgggtcagcatggctcgaactttatccccggtgccgctccccgccgccccattcagatttacccaaaaaatctgaatggaggaaaggcagatggaagttaccatcaattataacggacaagctgtggccgtggaggttacgctggaagtctatgaatttcttgaccgggccgatcataaaacggagaacctgttccatgaacagcggcggcattgggatggccgggagtttgacgagtacatcattaccaccgagggcgtagggggctacggcgaaacgccggaggaatacctttgccgcatggaaacgctgcatgagctgatggctgttctggacacctgtaccgaggcccagcgccgccggttcctgctctatgcgcttgacgggctgagccttgcagagatcggtgtgctgtgcggctgctccaaagtggctgtgtatcaaagtgtggaggcggtcagaaaaaaatttataaatttctttgagaacaggcttaacgaatgacctgttttctggctaccaagtgaaagggattatttcccttatctcagcgaggggcggacagcggacgagctgtccgcctctccgattttcaggaggtaagcctatgaaaacaatcaatctgcggtggatgtatccccactaccggcatgacgagtttgtggatgttacggacgaggtatgggcagcgatgtatcaggccaagcgggagatggagaactatgagcgtcggaaagtctaccaccgcgcctactactctctggacgcatacagctggctggaaaattacgcactggaacacagcagatcgccggaagatattttgctggaacgagaagaaatgaccacccgcctatacctgattgcagctctgccggtggctctggctcatgccactccgacacaggcccgccgtgttcacgcctactacattgccggtatcaagcagccggaaatcgcccggagagagggtatccatagcagtaaggtcagcgttgccatccaccgggggctgcggaatatgcgccgttgctatgatgtcctttttcaaacagagtgagggcgtgcctatgcagaccatcaatctcaaacaatattatccattttgcaaagaggacatttttgtggaggtgtccgatgagatcgtcgaagcgtttcttctggacaagagagccgaggccgccagagatcgcaagatgttccggtataaggcgttttattccctcgattgtaacgatggaatcgaaaatgccgccatcggctgggcgcagccatcgccggaggactacctgatagaaaaagaagaattggccgaatacgaagaactgatacggcgattgtatgaagccatttcctccctgccgcctatgcaggctcgccgtgtccatgcccgctatatgctgggtatgaaagtgaaagatattgccgcaatggagggtatcacgccatcacaggcgggaaaatccatccatgccgcactgcggagactgcgccggtactttgctcgacagaaatggacggtcaatctatgagtatttccaaagaaaagaggtgcctgacatgaacgaaaaaattacagcccacccccaaaaagaagaacgggagaaagtcctgaaggagattcggcagcttgaaaaccgcaagaagattttagagaacaagcagcggaatgaagaacgcaggggtcgtacccgccgcctgattgagcgcggagccgttttggaggggattttcccgctggctcccgacctttccggcgcggaggtcaaaacatttctgattgccctgtcccatcttccgggggctgcggaattgactgcaaacctgccaaaatccggggacacgccataagtcccttgtttacaagggcacgccataagtcccttgtttacaagggcgcacttatacaccgttgccggtgctgtgcgccctgccgggggcattgcgtacttcgtccgcgatgggaagctacgctccccaaaccccttgtgtgctctgcgcagccaaacacccgctttgcgtttgtccggctccacagagcctgttatcccctcactgaaaggaggtgttccccatagatttctgtcatatccccgtcagtatcatcaagcgcagcgcaggccgttcagccgttgccgcagctgcttaccgcagtggaaccaagctgacaaatgaatgggacggaatgatccacgactacacccggaaaggcggcattgtccatgcggagatcatgctgcctgcccacgccccgccggaatttgcagaccgttctatcctctggaacagcgtggagcaaatcgagaaagcaagagacagccagcttgcccgcgagattgaggcagctttaccccgtgaactgtccggcgaacaacagcttgcccttgtgcgtgcctatgtgaaggacaactttgtagacaaaggaatgtgcgccgactttgctatccatgacaagggaaccggcaaccctcatgtccatatcatgctgacgctccggccgttgaaagaaaatggacagtggggcgcaaagtgccgcaaggcatacgatctggacgagaatggacagcgtatcccggatgggaaaggcggctggaaaaatcatcgggaggatacgaccgactggaacgataaaggaaatgtggagatttggcgggcagcgtgggcagcctacaccaaccgggcactggaatctgccggtagaccggagcgtattgaccaccgcagctacaagcggcagggcattgataaaattccctctgtccatctggggccagctgccagccaaatggaaaagcgcggtatccgcaccgacaagggggaagtaaaccgacagatcgtcgccgacaacaagctgctgaaagaaatcaaagctcgcattacccgtctttatcgctggtcgaaagcggaagcggaaaaaccacaaacgcagcaaagcagcttgaccgccttgtgggaagcccaacagcagttgaacgctccccgcacccgcaccggcaaaatccgggctttgcaggaaagcgctgcactattcagctttttgcaggtaaacggcatccagtctatgcagcagcttcatgaaaaaatcgctgatatgaacagctgttactatgacctgcggggaaagatcgtcaaggctgagcgccggatcgccattcttaccgaacgcggggagatgtgggaacagtacaaccagtacaagtccatccacaagcagcttgccaaagtaaaaccggaaaaacgggaacagtttgagcagcgccacagccgggaactgatcctgtatgatgcagcagcccggtatctgaaagaactgaaagacagcggcgaggggatcaccccgaaggcatggcagcgggaaatcgaccagctggccgccggaaagcagacggacacgcttgccatgaaatccatgcgggaggagttgaaagcagtggaacggctccgcaaaaccgccgagcagctgtcccgacaggaaagggacaagtctcacgaccgtgggccggagcggtaaaggctaccgcgttttggcgtacccctgtcaagtgcgtcgcgtttcacgacatacttttgcatacagaaaaaccgccgtacaggtttccccatacggcggcagactgtttatttgccgaacaagtcgctgtgtgtgccggtgcgggccagcgtcagcaccagaacatcatcctctatgcgatagacaagcagccagtccgggagaatatgacattcccgatgacctgcccaatcgccggacaggtcatggtcacggttcttatccggcagcggttcgcccattgccagcaatgctacgacctgctccagcagctcaatcttcaagccacgcttgatggctcgtttgtagtcctttttgaaactggtcgtgtacttgacggtatatttggtttctttcatcttttcaggtcagcaaataactcgtcaaggtcattgtagccctttacagacgggtcttttgcaatcctttccgcttccagcatggcagcaaccgtttctttgttcggctgttccagccttacttcaaagggaatgccgccttcacgaagcgactggcgcacaaagatgttaaacgccgtagtcaggttcatgccaagttccgtaaacagtgcgtccgcctgcgctttcaaatctgcgtccatgcggatactgatgtttgtggtatttccagccatacgatcaacccctttctgctggcaattatagtatatgccatttgcacgaagaaaacaatactttgcacgaatatttaacaataaattcattcaaggaggttacctgctttatgaaagaaatcatttatgaagaacaacaagactgaacctatccctgtcatggattaccgccagtaccgcagagcgcggaaactggtgcatgagtgctgcaactacattgccggaaactgtatcgccttggacgatggggaggaatgtatctgtgtccagtccatttcctactccctgttgtgcaggtggtttcgggcggcggtattgccgcaggataaggaactggaaacggcgctgttccaccggctgaatgctaagaaatgcgccgtatgcggggcgctgtttacccccggttctaaccgggctaaatactgcccggaatgtgccgcacgcatgaagcggattaacgccgcaaagcgcaagcggaaacaacgggagaaatgtcacgctttaggggctgaaaaacccttgtaaatcaaggctttttttgagggtgtcaaaggcagtctgatagatttatcctctgacccctaaaatagccttaaaatgcgtacagaatcccaaaagaacccctaaggaggaaccctatgtcagacaatcgaaaatattattacctgaaactcaaagaaaactattttgatgatgattccatcgtgctgctggaaagtatgcaggacggtgtgctgtattccaacattctgctcaagctgtacctgaaatcgctgaaacatggcgggcggctccagcttgacgaggacatcccttacacagcgcagatgatcgctaccattacccgccagcagatcggcactgtggagagagccttgcagatctttttgaagctgggtcttgtggaagtgctggacagcggcacattctacatgagcaacatcgaacttttaataggccagtcctctaccgaggccgagcgaaagcgggctgcaaggcttcaaaataaggctctttctgcgctccggacaagtggcggacatttgtccgacattcgtccaccagagatagagatagagttagagaaagagatagagataaagagagagatagagaaggtacgccctgaaacggggcacccttcccacacctatggccgttaccagaatgttttcctgacggatgaagaactggcagacttgcaggtcagctttcctgctgtatgggaacagtacatcgaaaagctgtccgagtacatggcttctactggcaagcgttatcagagccatgcagcgaccatccggcgttgggccggtgaggacgctaaaaaaacggtcacaccctcacgcaaccgggattacagcgtaaaggaggatgaaactgtatgattgagattaccgcagaaatccgggcattcatcgacaaggcagctgccggtgtggaattggctgaggacgagtatatagacccgtcagacgggctcattcactgtaagaaatgcggcggccagaggcagaccgttgtgccatgcttcgggaaatccggctactttatgccgcactgcatctgccagtgccagcgggaggctgaggagcagcgcaaggctgctgaagaacggcagcgccgcatggagcgtatcaaacgccgaaaggcacagggcctgcaagaccgttatctgtacgactacacattttccaatgataacaggcaaaacccattgatggacaaggctcatgcctatgtggagaactggaaagaggcatataagagcaatatcgggcttttactgtttggagatgtgggaaccggcaagtcttttttcgccggatgtattgccaacgctctacttgaccaggatgtgccggtgctgatgacgaacttccccaccattctgaaccgcctgacagggatgttctctgaggacaggtcagagtttattgccagctttgacgaatatgacctgcttatcattgacgatctgggtgtagagcgcagtaccgaatatgctatggagcagatgtttttcgtcatcgacagccgctatcgcagccgaagacccatgattatcacaacaaacttgaaactgtccgagctgaaaaatccgcctgatctggcccacgcccgtatctatgaccgtattttggaacggtgtgcgccgatcctctttgacgggaagaatttccgggaagaaaatgccggtgtcacccgacaggcagcaaaagacattgtaaacagtaagcacgattgattttttaccgggcggcacagacccgttcggagaaaggagcgctatgaacaaagaaccccgtactatgcagatggcagacgccgctgctgcggccagagcgccggaaaacacgccagcgatggtaaagaaaatcggcaagacgacctacaaggttcatgtccatttcagcaataccagcacagaaaccatgagcgataaaatcaagcgtatgctcaaaaatgaaattcagcagatgtgacagactgataaactaagccgccttgtgctaaactgatgatggtacgcaccaaaatttttgtcaaggaggacatgaaaatgctttacacagaaaaagagaaacatgaaattgagcgagtaaaggaagtctttgcggaacatctgcggcaaagccctgattttgaattgctctggtcggacaaggtgggctatgtctggctgacgattggcgtaaatccagtctatgtggataccggtatcaggatagaatctgccgccgatctctgcggcaagtgtttggatgatgttgctacggatgttttatatatgactggcaacgatcatgcactggaagcagccgacccgctggagttagccgaaatcaagcggctctgggagccatatatcaaccagctgccagactatgcgtatctctgcaaagacctgctgaacggaaaaatgtaatctgttaaatgaggtgtcaggagccatacagtgcttctggcaccttttgtgagttttctgtgaatttgattaaaaagtccttgacaatttgtctctggcaaaaccgcaaaaagcattttgatttcctgcggagctcgtctggctccgtttgacatcccccagctccgggaaattatgagttatgacgagctggagcttgaccgcatcggagatcggaaaacggcggttttctttactatttccgataccacgcccacctataactttattgtggccctggccttttcgcagatgtttaatcttctttgcgagagggcggacaacgtacacgggggccgtctgccccatcatgtgcgggtgctgtgggacgaggcggccaacacgggccaggtgccaaacctggaaaagctggtggcggtgatccgctcccgcgaggtgagcctgtgcctgttctatcagcagttggcacaatgcaaggccatctatgataagcacgcggagaccattctcggaaatatggacagcgtgatcttcctgggtggccgggaggccagcacaatcaaggaaatttccgagaactggctgggaaaggccacaatctccatgcagaccgagggccgctcccgcggccagtcggaaagctacaaccagaatacccagcggctgggccgggaactgatgacccccagcgaactggcgaccatgccgggcgacaagtgcattttgcagttgcggggcctgcccccgtttttctcgcccaaatacgatttgaagcagcatcccaactataagcaaacggcggaagccgataaaaagaaaaacgcctttgaccttgataaactcataaaccgccgcaggcggcctgggctgaacgaggcttgtgaggtgtacgaggtggccgtgtcggaaacttcgctcacagacgaggacgaggacatcctcaactatgacgatgtggacgatccggacgcttttgtataaatatcgcttcgggacaaagtgtcccgaagtggcaacctgccgccaggaatggcggcttttttcatggccggggcatctccccggagaaaaggaggctctatgcagtttttcgcatctgctatcgacactttacagacccttgttgtggccctcggcgctggcctgggcgtgtggggcgtagtcaatctgctggagggttacggttcagacaatccgggctccaaaagccagggcatgaaacagctcatggctaattagttggaacaaaaaacgaaaggaaaagcacaatccagacggtatcagcggcagtctacaagaataaattgtgatttcacaagattggtgttataataagagaaaagttcctgccggggcagccgccccggtggtatggatagaaaggcaggaaaacaatatgcacatcagctataaaccactctggcacacactgttagagcgtgatatgagaaaagaggatttaaggcttgctgctggtatgacaacaaatatgattgccaacatgagcaaagagggaaagcacatcagcatggatacattagcccgtatctgcgaaacgctgaattgtgagattaccgatgtgattgagttagtaccagacgagcctacttccacaggaggtaaggaacatgagcgaattgaaaccaagaataacggaaaatggaattgattatattcttgtcggagattactacatcccagacttgaaactgccggaggaacaccgccccatcggaaaatatggacggatgcaccgggaatatttaagagaagtccatccagccagattgaacacattgatactgaccggagaattgtggacatatcttgcagacctgaacgaacaggcacagaagcggttcgataccatcatggagcagatgaaagctgccgagggtgtgactgaggaattaaagcgtacctgtcaaatggaatgggtgcagcgttgcaataacattcgcaaccgggcagaagaaattgttttgcatgagatgatttattcataacgatatggtagaataattatgataaatcgaaatctataaaggagaatattgatgaaactatttttatgttcgcacttttcaagtgtaggaagtctgataaaggaagaaattgaaaataagaaagtcgcatttattccaacagcttcgctgcgtgaaggctacatcggttatgtcggctcggctcgaaaattattcaaaaagttgggagcaatcgtaactgaaattgatatttcaacggaggcttattcaacgatacagtctgtttttgaaaatgcagatgtgatatattttaccggcggaaattctttttttcttatggaccagctccgtaagacgggagctgatgggctgctgaaaaaggaattggcaaatggaaaattgatgattggcgagtcggcaggcgcaattatatgcgctccaagcatccaatatatcgagcaaatggatgaaaagccagaggactactcacaagaagatgatgcagggcttgatttgattgatttctatgttcttccgcattatcttacagcaccatttaagaaagttaccgagaaaataatgactgagttttcggatttgaatctatgcccaattaacaaccgtcagggaattgtaattgatggtgaaggttcaaaggttatttgcaaagactaatttgaaaattcctgtttttgaaaccggaaaatcggaagctgagggggatagactattgagaacatatgagaataaagacgagcttaaaaacgagataaataaaagctttgcaaagtatatttcagaatttaatgatattcctgagcatttaaaagataagagagttgatgagatcgatcgaactccagctgaaaatcttgcttatcaggtcggctggacaactcttgttattaaatgggaatcagacgaaagaaagggtattcctgtcaaaactccttcggataattttaagtggaatcagcttggcgaattatatcaatggttcacagatacatatgcccagctgtcactgcaagaattgaaagacagattgaatgagaatatcaactctatttatgcaatgattgattctctgagtgaggaagaattatttaaaccacatatgagaaaatgggctgacgaagcaactaaaacagccgtctgggaagtatacaaattcatacatgttaatacagttgctccgttcggaacctttagaaccaagattagaaaatggaaaaagattgcactataacttccagcttgtctttcagaaattctaactgaataatcacagcacgaaccgctgctacatggaatgaagccaacaaaccatgcaacagcggtttttctttaccattttttcctctggctgataggcgttcccattttctttgatttttggagaatccgaatcagccagcgaaattcttcttccgataaatttttgtagttgataccgagttgcttgcagtaaagcattgccagtttttccaaacggctgcccttgaaattttcgacggcttccagattttctttcagttcatcggcaacggtggtctggggcgcactttcactgtcctttttgtgggattcccgaatatcccggataatcaggttgaggtcatccagaaccatgtggctgaaatattcatcatcactgatatgggcagcttgcagcactttcaaatgcgggtcatcttcgccggggcgataccgttcaatgatttcatgccggacggtatcaacaagtgcattgaggttttgaatctgcatggtggcaatcccgtccacataaatctcaatgtctgcaagaaacttgataaaatctttatgtgtggcaagctcacagagcagacggttgttaatccgaccgcttttcagaagtgcaaccatctcatcgttcaaatgcagctccgtcaatggcgtgttgatctgctccttgttctctgtccggcacagcagataatcaacggaaaccccatagaagtctgccagcgtgatgaggtttccatgattgatttccttaaaatcttctttttcataactgccaagggctgatttagaaatacccgtcagctttgaaagttcttccagatttaagcctttgtccttgcggagttcccaaaggcgttcctgtatgcttgttgctcctttcatgggtgcacgctcctttccggcggtttcattgttgccgtttaactggattatatcacactttccgcaatcgtggaaatttctgatttttacccctaattcctactttgtggacatacggcacagggcacaaaaatgttctatgatacaggtagttcatcgatggattattccaatcgaatgaccagcctgtgtgggatatgcttccccggcgatgtagcgccatgacttttggcagggatatggaggaaccctgaccgaaacgagcgtaccaaagggagcgatacgccgctgtgagattcaggggaggaacgacaccggggagaactggcgaactgacaccgaaatgataccgaaacacgacaatctgatagggggatagtctaccctatcgctgatactttgggagattttaagcggctctatggctgtaattttgccgaaaatcgccccgaaaccatacacgaaaacgggaggaaacacaatatgccgagaatgagcaaaaagaggaagcatgagctttccttttacctcaatgaccgggggcgtgtcacttacaacgaattatgccggaaatgccagcatgggtgcaagcagagcttccgggcggttgtgattgactgcccccgttatttatccaaacgagcaaagaaaaaggaggaacacaccgaatgaattttgaatttatgacgatagacacaccattaccgccctgtatgccatttcccagagcgttgacaggatttccagtcagcagcaccgcaaaggtcatgtactgccggatgctggacgctatgctatccaaagggaaggaggacgagaacggaatcctgtttgtctgcttccccatcacagccattgccgcagtcctgtcccgcagccccatgacggtcaagcgttctctgaatgaactggaaaccgccggacttatcatgcgggtgcgtcagggcattggagaaccaaacaggatttatgtgctgataccgggaaaggaggacgctgcccttgcctgatacctcaaaactggaaaagctcaaccgggagttggaaaaaagcgaaaagaaactgcggaaagccatcaatgatgaaaaggcattgcagcaccagttgaagcagcttacccgaaaggaacggacgcaccggctctgtactcgtggcggtatgctggaaagttttctgcaagagccggaacgcctgacagatgatgatgtcatgctgttgttgaaactcatttttcacaggcaggacacgcaggaactattgaaaaaactgctggaacgggagaagccggaaaccccttagtttactaagggcgcaattatacaccacccagaggttggcgcattgcgttctccgaaggctcctcgccggagggctgtaattttccgcagccacggtctgctccaaatcaaacaggggacgctacacttcccctgcgctggctttcgccagctacccttttgtggacttgccatctggggacaccttgcgttgcaagctgttcccagccgacaagttttacagaatcagttttctgtcttttgagaagaaatgaaaaatgttatactaaaaaatgaaaatgcctattgactctcacggaacgtcatagattaaagttaccttatcaggaacaggaggtcagcagctatgaggacagtaaaagaaatatcagatttaacaggtatcagcgttcgcacgcttcactattatgatgaaatcgggttgttaaagccaacagaaaaaagtgatgcgggataccggctttatgacgataaggcactggaaacattacaacagattttatttttccgtgagtttgatatctccttgaaagaaatcaaagctgttttggacaatccggctcttgaaagaaatcagattctacaagtacagcgaaaaatgttggtaacaaagaaagaacgaatggaacgtctgattgccagcattgatgacattctgaaaggagagaacaaaatggattttacaatttttaccaaaacagaagtagaagaaatgttccaaaccatgcttgagcatatgccggagaatatgagaaacattgcaattaaagaatttggtagcattgaacaatggaaaaagcattatatggaagtcgtatcttcggaagaaatgcagaaaggctatgcaaaggtagttgaatggtatggtggaaaggacaagtttctgtctgttgcccgaactcccgtcagcaaagaagttgcagaaagctataacaaacggatagaagcgattttgcaaaaactgattgcaaaacagaattgtgacatagattcttttgaagtaaaagagcttgttggagaatatggctttgttatgaaacagcttgcccagataaaagaagaaaaaggctttatgatggcacaggcgcagtattaccgcaatgaacaaatcaaaccaatgatagacgaaaaatacggtgaaggggcttctgatttctttgcacaggcaatagaaaactattataaagttaagtaatcttgaattttaactaaatacccgccgcccccagcggcacaccaagcaggaaatctgaaaaaggtctcctgctttttttatacctaaaatcggaaaggaggaacactaaatgccctgtccacacaatcaaatctccatcgtccagcgtagcaaccgccagtctgctgttgccgccgctgcttaccaaagcggcgaaaagctgttctgtgaatacgaccagcaagtgaagcactacccagaaaagcgtggtatcgtccataatgaaatcctgctcccggcaaatgccccgccagagtatgcagaccgcaataccttatggaacgccgccgaagctgttgagaagcaatggaactcccagcttgcaaggcggtgggtgctttccattcccagagagataccgcccgaccagtacgccgcccttgtccgggatttctgcaatcagcagtttgtttccaaaggaatgtgcgtggattttgccatccatgacaaaggggacggaaaccctcacgctcatgtcatgctgactatgcgggcaatggatgaacatgggaaatggcttcccaagagccgcaaggtttatgaccttgacgagaacggggaacggataaaacttccgtccggcagatggaaaagtcacaaggaagatacggttgactggaacgaccgcaagtattgtgaaatctggcggcatgaatgggagatcatccagaaccgctatctggaagccaacaaccgcccggagcgggtggatctccgttcttatgaaagacaggggcttgatattatccctaccgtccatgagggtgctgctgtccggcagatggaaaagcgagggattcagaccaacatcggaaatctgaaccgggaaatcaaagccgccaacagcctgatgaagtctatccggcagcttattaaaaatctcaaaggctggattatcgagcttagtgaaaaacgaaaagaactgcttgcggaaaaagctgcggaggaagcggtatttcttcccaatctgttgatgaagtacatggaggtacgaaaggcagaacggagcgactggacacgggcgggacaaaaccgtggaacttccaaagacttaaaggcagtcagcgaagccctgtcctatcttcagagaaagggactttccaccgtggaggatttggaaaactttatagaaacgtccgggaaatctgccgccgactaccgaaagcagatgaagccaaaggaaacccgcagcaacgtgattgacgctatccttgccgcccggacggactgtaaggaatgtaagcccgtttatgagaaataccagaagatatttttcaagaaaactaaggaaaaattcaagctggaacacccggaggttgcccggtttgagaaagccagtgcctaccttgccaagcacccggacgataaggacagcacgaaaaaggagcttttgcaggaacaggcgaagcttgtggacgaaatcgcagacttgaaagtaccgttgaccgaggtgcaggaagatttgaagaagctgtgggacatccgctactgggtacggaaagccacacccggcacagaggaaagcaaagagccgcccaagaagcagcccctcaaagaagtcttgcaggataaggctgacgagaagagagcacagaaaaacgccccggcgcagacgaaacacaaacaacaggatatggaactttaacaggcacttgccattttcagattgagaatgataagtgccttttcttttttacaaggaggaattgatttgaatgtatttgaagctgtgaagcagtccgttacgacaagacaggctgcggagcattacggaatccgggtaaacagaaacgggatggcttgctgcccgttccacaacgataagacccccagcatgaagctggacaagcgtttccactgcttcggatgtggtgcagatggggatgtgattgattttgtagctgccctgtacgggctggggaaaaaggaagccgccgcacagttggcgagtgacttcgggcttgcctatgaggactggaagccaccgggcagggcaaggaagcccaagccccggcagaaatccccggaagaacagttccgggaagcaaaggcacattgcttccgtgtccttgccgattatctacacctcttacgggtatggaaaaccgactatgccccgcactccccggaggaagcgtttcatccccggttcgtggaagccttgcagaagcaagcccatgtggaatatctgctggatgtgctgctgttcggggagacagaggaaaaagcggttttgattatggactacggaaaggatgtgatacagcttgaacagcgaatggcagagcttgcagccgcagacgcagcaagaactaaaaaacaccatgaacgccatgcagccgccccagagcgttgaggaagtaaaggcaactctggaaaccaccgagaaaggcggcgtccgccagagcatacggaactgcctgaccgtattccagcgtgaccctgtgcttgccggggcaatcgcctacaacatcctgaccgaccgcaaggacatcataaagcccatcggttttcacagagaaagcacagccctgaccgatacggacatgaagtatctgcttctctatctggaggaaacctacgggcttaccagtgagaaaaagattgaaaccgccatcgggattgtggcgaatgagaataagtaccaccccatccgggattttctgaacagccttgcatgggacgggactgagcgcatccgcttctgtctgcggcactttctgggagctgacgcagatgattacacctatgaagccttgaagctgttcatgctgggggcgattacaagggcatttaagcccggaagcaagtttgaaatcatgctgtgtctggtaggcggtcagggggctggcaaatccaccttcttccggctgctggcagtccgggacgagtggttttccgatgatttgcggaagctggacgatgataacgtgtaccgcaagctgcaaggtcactggataattgaaatgtcggaaatgatggcaaccgccaatgccaagagcattgaggaaatcaagtcctttctaagccgccagaaagaggtttacaaaattccctatgaaactcacccggcagaccgcccccgtcaatgcgtgttcggcggcacttccaacgcccttgactttctcccccttgaccgttccggcaaccgccgatttatcccggtcatggtgtacccggagcaagccgaggttcacattttggaggacgaagccgcttccagagcctatatcagccagatgtgggcggaagcaatggagatttaccgaagcggcatgttcaagctgtcattcagcccagccatgcagcggtatctcaaagaacaccagcgggattttatgccggaggacaccaaagccgggatgatacaggcttaccttgataagtacaccggggaaacggtctgctccaagcagctctacaaggaagccttaaaccacacctttgatgagccgaagcaatgggaaatccgggaaatcaacgagataatgaaccagtgcattaccgggtggaactacttttccaatccgaggatgtttgcggaatacggcagacaaaagggctgggagcgtgaaatcccggcaacggacaccgacaacccgcccgaaaaaacgatggacggttttgtggaggtcacagagcagatggagcttccattctgaaaatgacagcccgttgccgacttcgttgctatcccgttgccgagccggttgccggggaaaatcccttatttccgggctttttccctctctgacaaccaaaacaacagaaaaataaaagaaaagtataaatagtaatcaacgccagattgagattgtttgcaaggtcttttgaagcccgttgccggacttcgttgccgaccgttctctgtctggctattttcatgtatggaggataactgcctatggcgaaaaataagaccaagattgaagtgacaaccgtatttgacggggaactggacgccaccgatgtgttcgtcagcctgatttcccagaaatacggcaaaacaaatacaaaagaatatcttgctaaaaagaaagatttgaagtataatgaagatgaggttcaacagagccagataccgtctggattgtgtgggtaaatggctatgatgaacgaaatggaatacagaacaatcggttcagcacttgccgggggctatcgtgcagcggtctattgcagactgtcaaaggacgatgacctgcaaggcgaaagtgccagtatcgcaaaccagcgtgatatgctggaaaaatactgcgaaaagcagggatgggaggttgtggcagtctatcaggacgatggcttcacaggtcttaatatggagcgtcctgatttacagagaatgttgagagccattgagcgcaggcaggtcaaccttgtcatcacgaaagacctcagccgactggggcggaactatctgcaaaccgggcatttgattgaggactttttcccaagaaacggtgtccgctatatcgccatgaatgacggtatcgacaccctgcgggataacaacgatattgccccgttcaagaatatcctgaacgagatgtacagcaaggatatttccaagaaagtccattcctcttatcttctgaaagcgcagaaaggacagtttaccgggtgtcttgccccgtttgggtatcggaaagacccggaggacaaaaaccatctgctcattgacgaggaaaccgccccgattgtgcggctgattttcggatatgccctgaacggtcatggtccgaactatatccgcagacggctggaggaagaaaaaatcccctgccccacatggtggaaccgggaacgggggcttcgcaatacccgcaccaaatgggaaaagaaagacccggaaaacgggcggtatatgtgggacttctccgttatcaaagaccttttgatgaatcccgtctacaccggggcgattgcttcccagaaaaaggactaccgtttcaaaatcggcacgattggggaaaagaagccggaggactggattgtggtggagggacagcatgaaccgctgattgaccgcatgagctttgacattgtgcagaacaagctgaaatcccgccagcgtccggggcagaccaatgaaatcagcctgtttgccggactgataaaatgcggcgagtgtgggaagtcgctgacgatacgctacacaaacgaaaaacatccccagcagatttattcctgcaagacctacaatgcctttggaaagaaccactgcacccagcaccggattgactatgacaccctttacagccatgtgctgcggaaaatccgggaatgtgccagagctgccctgatggacggggaagcggttgccgaccgcctgaccaatacctgtgaagccgagcagcgggaacagcgggaagcaatggaacgctcccttacaagggatgaggaacggattgaggttctggacaaaatggtaatgcggctttatgaggatatgattgcagggcgtatcagtgagcagaacttcaacaccatgctggaaaagacacagaccgagcagacggagcttaaagcaaaagtgtccgagggcagaaagcggctgtccgatgaagtccagcttgccaatgacgcaaaacaatgggtggaagccattcaggaatacgccaacatcacagagctggacgtagccaccctcaaccgcttaatcaaagaaatcgtcgtgcatgagcgcattgacgaggataaaacaagacacatttctatcgaaattcattttaatctcaaacccatcccggaggtggaacaggtcactgcctgacctgtcccgccgggacggttctcttaaaaacaccatatagattttttgtacgccgccgcccgccatcgagcagagttttacacctaattggggataaaacagctcatggcgggcggcggcatcatcctgctgggcacaacgctgatccccctgctctctggcctgttttaaggtagcggcttatggattttctcaccgactggctcacggattggctcaaggagcttttaatcagcgggatcatggggaacctttcggggctctttgataacgtaaacgcccaagtcggagagattgcggtacaagtgggaacaaccccggcggcatggcacgccggggtgttctccctgatccgccagctttccgaaacggtaattttgccgattgccggaatggtgctgacctttgttgcgacctatgaactgatccagatgcttttggaaaaaaacaatatgcacgagtttgatgtggcgaatatctacaaatggatgttcaaaacgtcctgtgccatccttattctgtcaaacacattcaatatcgtaatggccgtgtttgacgtgtcccagagcgtgattgcacaatcggcggggctgatccagggttccacggacattacgccggatatgctgacccagcttgaaacgacgctggagggtatggatttagggccgctgttgggcctgtggctccagtcctccattatcggcgttaccatgtgggcgctgaatatcattattttcgtgctggtctatggccgcatgattgaaatatatctgctcaccagcctgtcccccatccctgtggcgacccttgccaaccgggaattgggacacacgggccagaactatctgcgctcgctgttcgccgtgggattccaggggatgctcattctggtgtgcgtggcaatttacgcggtgcttgtccaggggatcgccacaggcggagatcccatcggggcgatatggggcaccgttggctatacggtattgctttgctatatgctgttcaaaacgggcagtatctcccagcgcattttcggcgcgcattagaggggaggcgcgtatggcagaacattcaaccttgggacaaaatgtcccgaagtccccggctcccccggaggggctgttccttatggacggcatcgagggcctgcgctccctgccccaacactcggttgatatgctcttgaccgatccgccctatggcacgacccgcaacttttgggatgtgcccctgccgctcccggagctttgggaggcggtgcgctgggcggtcaagccggagggtgcggtgctgttctttgctcaatgcccctatgataaggtgttgggggcctacaacctccctatgctccgctatgagtgggtatggtacaagagccggtgtactggctttctcaacgcaaggcgggcccccttgaaacggacggagaacattctggtattctatcaaaagctcccctattacgatccgcagttcgagcagggcaagccctataagaaaaccgctgaccggggcggcaacagccccaactatggaaaatttgtccgttccggcggcggctccgaggacggcctgcgctttcccggaaacctgctgacattcccatcggtacagcgcaccgtccaccccacgcaaaagcccgtggagctgtgcgagtatttcatcaagacctacacccgccccggcgaggtggtggcggacatctgcgcgggctccggcacaactgccgtggccgccgtcaacacgggccgccgctttatctgctttgaaaccgccccggccttttacgccccggccacggagcgcatccggctggcgcaggcggctgcggaggccggggagaaaggagtctgactatcggaaactattctatcatctacgccgatccgccctggcggtattctgcaaagaacgtacagggggcggcggaaaatcactaccccacaatggggatcgaggagctatgtgcgctcccggtggctgatctggcggccccggacagcgcactttttttgtgggccacgttcccgcagttgccggaggccctgcggctcattaaggcgtggggcttcacttataaaaccgtggcttttgtctggctgaagaaaaacaaaaaggcggacagttggttttacggcctgggcttctggacgcggggcaacgcggaaatctgcctgctggcgaccaggggccatcccaaacggcaggccacgaatatccatcagtttatcatttcccccgttgaagcccacagcaaaaagccggacgaggcccgcgacaagattgtttccctcctgggcgacctgccccgcgtggagctctttgcgagacagaccccgcccggctgggacgtgtggggaaacgaggtggagagcaccgtcccggacttcgggacactttgtcccaaggtgggcggcccgaaaggaggtctttcatgccctatgtaaatgtacccaacgacttatccaaaatcaaaacgaaaatggcctttaacctaaccaaacgccagcttgtctgctttggcggcgcggcggcggtgggtatcccctcctatctgctggcccgcagctctatcggcaacaccggggccatgttccttatgctggccgttatgctcccggcgtttttgctggcgatgtatgagcgtgacgggctcccctttgaaaaggtgattagaaatatcatccgggcccgtttcctgcggcccggcgcgaggctctatcagacgcagaatttatacgccccgtttaccctgcggggctccgtgggaaaggaggatgcgattgcaacaagcaaaaaagcaaacacccaggcgcggccccgccgcaaagggtaaaaaacgggcggccctgtccgcccagcagacaatcccctatgtgcggatgctcccggacggcgtgtgccagctccccggcgggctctatacaaaaaccgtggaatatgaggacatcaattattctgtggcaagcaccgaggatcagacggctatctttagcggctggagctcattcctcaattactttgacagctctctgccgttccagctttctttcattaaccgccgttcccactcccggagccgctacaaggtgaacattccccaggccaaggatgactttaacagcgtccgggccgagtttaccgggatgctgaaaaatcagattgcccggtcaaacaatgggattgaacgctcaaaatatattacctttggcatcccggcggaaagtctggacgaggcgcggccccggctggagcgcgtggaggcggacgttatgagcaactttaagcggctgggcgtgccctccgagcctatggacgggcgggcgcgtctggccctgcttcacggccagatgcatcctgggagccgggagccgttccgcttctcctggggggatattgcaaagacggggctcggcacaaaggactttattgcccccgacagctttgacttccgccagccccggctgttccgcatgggccagtattggggcgcggcctcctacttgcagattttggcgtcggagctctctgacaagctcctggcggaaattttggagcttgacgcggaaatgaccgtgaccctccatatccagaccgtggatcagctaaaggcgattaaaaccatcaaggggaaaatttctgacattggaaaaatgaaagtggaggaacagcgcaaagctgtccgggccggatatgaccccgacattctgccgcccgaccttatcacattttccaaggacgcggcggagcttctggccgacctccagtcccgcaacgagcggatgttcctcttgacctttaccgtggtaaatctggcccccacccgccagcggctggaaaatgatattttcacggtgggcggtatcgcgcagaaatacaactgcacattgaagcggctggactggcaacaggagcagggctttgtttcctccctggccctgggcgggaatgaggtggaaatccagcggggcatgactaccagctccacggcgatcttcattccctttatgaccagggagctccgcatggccgggccgtccctctattacggcatgaacgcactttcccacaacgtcattatggcggacaggaaaaagctgaaatccgcgaatgggctctacctgggctctactggctccggcaagagcttcgcggcaaagcgggagctgctcaacgtctttcttaccattccccaggatcggattatcattgtagacccgatgggcgaatatgccccgctggtgcggcggctgggcggccaggtgattgagattgccccggacagccctaatcacattaaccctatggacatccagatgggcggcaacgacgaggacagccccctttccatgaaagctgattttctgctgtccctgtgcgagctggtggtgggcggcaaggagggcttacaaccgattgagaaaaccgtcatagaccgctgtgtgcggttggtctaccgggatctggccctgggcgtgggggacggcaggatgcccttgctccaggacttgtacgaggaacttttgaaacagccggagccggaggcccggcgcgtggcgacggccctggagctctactgtacaggctcccttaacctgttcaaccatcccacgaatgtcaaaaccgactgccgtgtggtgtgcatcgtgcttaagggcatgggagacaatctccgaaaaattgcgatgcacgtcacaaatgagtttgtcaattcctcggtcaataccaactatcagagcggcatctcgacttggtgctactttgacgagttccatgttctgctccgggatcagctcaccgccagctattttgtttccatctggcagatgctccgcaaacggggctgtgtgcccagcgcgttgacacagaacgtcaagcacctgctggccagcccggaaatccagaatattctggacaacacggattttatgatcctgctgtcccaggcgcagagtgaccgggcaattctggcaaaacagctcggcatttccgagcatcagctttcctatatcacacacagcaattccggcgagggcctgctgttctatgggaatgtgaccatcccctttatggatcgtttcccccgtggggagatttacgatcttctgaccacccgcccggaggatttgaaagatggcgcggcgggataaggctggccctgggccccgtgtgcgcccggagcaggccgcgccccagggggctccgggcccggaggccggggctggcacgaaagaacaggccgggggcacttcgggacaaagtgtcccaaagtctaaattccggcaaaagagcaggcaggaacaggccgccgcgtccaagctccgcatggaaaagcgcggggagaagctggaggcggcaaagggcaagctggcaaaacagaagcaccccaaaaagcccggccccgtcaaacgggcgggcggggccctggggggctccgtccacggctttgtgcatgggaagatttacgaggtggagcaggaaaatgtaggcaccgagggggcccatcactccgagcttttgggcgagtccgcgtttcgccagggctcccgcttcgtggggcggcgcatacgggagcacccggcgcgggccgtccagcgggccgaggcccggcatggcaaggctgcggcggactatcaattttacaccgccgcccaggaacacccggagctctcgaaaaatgccctgtcccgctactggcagaaacggcggctccgcaagcagtaccaaaagcgggcaaaggaggccgcccgccagggggccgtggccgctgaaaagaccgcctgggccgccaccgaaaagctgtcggcccaggcggtgggctttgtgaagcggcatcccctgggtgtgctcttggccctggcctgtgtcctgctcattctgtctatgcagtcctgttcgtcctccctggttttgcttggcaacgccggggccggggctgtgggggctaccacctacccgtccccggacggggaaatcctggcggcggaggcggcctacctcgatctggaggcggagctccaaaactatcttgatacctacaccagcacccacaattatgacgagtaccattttgatctggatgaaatcgaacacgatccctatgtgctgatctccattctctgtgtgctccacgagggggaatggacggcggcccaggtgcagggtacgctggggatgctctttgaccgccagtatattcttacagagcgcgtggtggtggagacacggtatgacagcaacgacgagccctattcctggtatatctgttatgtaacgctggaaaattttgacctgtcccatctgcctgtgtatttcatgggcgaggagcagttggcccggtactccctctatatgtctaccctgggaaaccgccccgacctgttccccagctccgcctatgtggatcgctatataacaaatccgcccgccggatatgaggtgccgggggaatatctggacgatgaaacattcgccgctatgctctccgaggcggaaaaatacctgggctatccctatgtatggggcgggagctccccggccacgtcctttgactgctccggctttgtgtcctgggtaatcaatcactccggctggaatgtgggccgcctgggggcccaggggctctataacatctgtacccgcaccagctccccgcgtcccggtgatctggtctttttcaagggcacctatgacacgccgggcgtttcccatgtgggcatctacgttggggacggaatgatgatccattgtggcgatcccatcagctatgcaaacttaaataccagctactggcagtctcatttctacgcctacgggcgtttgccttgaatggaggttttgaatggcaacagcaaaaagtatgaaaatccaggccgagattgataaggtcaaggccaaaatcagcgaacagcaggcccggctgaaagaattggagcagaagaaactggaggccgaaaacagcgagatcgtggacatcgtgcggggcatgagcatcccccttgcggagctccccctggtgctccagaagctccgggacgatggcactttgggacaaagtgtcccgaagtccgagcccgcgcctgttaccgagggaaaggaggacaactgaatatgaaacgctttcgagtcttgacggcggcgctttgcgccgctgttcttttatgcggctttacccccgcaacggcctacgccgggggcggcgaggactgggaggggcttgaccccgtggagcccgctgtcacggaggagccggtgattgagcccggcgagggcttttctgaggacggcaatcttgtgacccgtgatctgctctatgacaagcataccaacaagcagtttattaccgtccagaccagcggcggggccaccttttacattgtcattgactacgacaagcccgtggacgaggacggcgaacagtaccagacctattttctgaatacggtggacgaggccgacctgctggccgctgccgaggccgctggcgtagagctggcctcctgctcctgctcggacaaatgcgcggcgggggccgtcaataccgactgcgcggtgtgcgccgtcaacatgaccgagtgcgcaggtgtggagcaaaagccggaaccagaaccggagcctgtggccgagcccgacgccgagccggaaacagaaaaaggcaacgccgggatgctcctgctggtgctggccgtggcggtgctgggcggcggggccgcgttctatttcaaggtgtaccgccccaaacagcaggcggcaacagagccggaggaggactacggcgaggaactggaggactatgacggcgaggaggacggcccgccctgggatgaggacgaggacgaaaacgaggatacggaggacggggaatgaatttcacagcaagctcttttgaacggatgatgaaacaaaagccccggccccaggctcccggcccggccaaaccgcccagaggctccgcctgctccggctgtccctactggcggggcctgcgctgtgtctgctgttatcagaaactttctcccaggccgggcggcgggaggtgacgctttggcccgcgaactgacacgggaggaaaaggcggccatccgctccctggtggtgaaatggtgcgccaactatgaccgggcctgtggatgcctgcccctggactgtgagtgctatatgctgggaaagtgctggacaggtgcctattgccgctacttccgggaggccgtcctgccccttgatccagctctggaggccgcccttactactgtgggccccaggccggatttcaagccctgccccatctgcggcggggccgtggccccggacaggcggcaggcatattgttcagaggcttgcgccttaaaagcccaccgccgccaacagcgggaatatatgcgccggaaacgggggtgatctgttgacaattagcccccggaaaacccgctgatttcaaggctttttggggccgcttttggggcgggccgtagttttatatgcccggccctggaatggccgaaatgttgtcaacatggaaaaacgggactttgggacaaagtgtcccgaagtcccaggctgttatgcttgaggaggtgtctatggaaaaacagaaagaccaggaatttgcacatctggaggtcaaacgtctttgcggcgtgttcggcgcgcccctgccccctgtggaggaaaagcccgtggataaggtcaaggagccgccccgcccctatcggagtcgggaacaggagtagcggtgacaaagaaacgccgccgccctgtccatcttcatgtcatggtgtctgaggaggagcaggcgctgatccgggagcgcatggccgaggctggcatccgcaacatgggggcctatatgcggaaaatggcccttaacggctatgtgctccacgttgacctctcgcccgtccgggagctggtgtcgctccagcggcggtgctcaaacaatctaaaccaggtggcgatccaggccaacacctacggcggcatctacccggaggagatcgccgctctgcaaagggactatgcggccttatgggggccgctgtctgatttactggaaaggctctccgccgtggtggagctttgaccctccggggagcggtgttttaccgctccccggttttcacgactttgggacactttgtcccaaggtggcgaaagccgcatacagagaggaggggtattcacggccacaacctacatccggccttacaaggtagcggctggaaaaagcgcaatccagacgatggaggagcggtttgattatgggctcaatcccaaaaagctgggggccgtgtccgcttatctctgcgacccgtccacagctcccgccgagttcctgctggtaaaaagccagtaccaggcggaaacggcccggcccgtggagcgcggggccctgttcttccagatccggcaggcgttcccgcccggcgaggtgacggcggaggaggcaaataaaatcggctatgaaacggcgatgcgctggacgaaaggcaaataccagttttttgtctgcacacataccgacaagggccacattcacaatcacatttattacaactccacggcctttgaccgctcccggaaattccataatttcatcggctcgtcctttgccctgcggcggctgtctgaccgggtgtgcattgagcacgagttgtcctatatccaaaatcccaaactgcacagcaagggccgttttctccattacggtcaatggattggggaaaagccgccctctgcccagcagagggtgcggctggctgtcatcgcggccctggagaaaaagcccgccgactttgcggcgttcctgcggctcatggaggagtccggctttgccgtcaagcatgggcggggcggcgtgatctcgttcctggctcccggccaggataaaccgacccggctccgggcttctaccctgggcgcgggctttgacccggaggacatccgggcggtgattgccggggagcggcccatcccggaactcccccaggacgctccggccccgccccggcgcgttgatcttgtgattgacattcaacagcgcatggcccagggcaagggcccggcctatgcgcggtgggccaaggtctacaatctaaagcagatggccgccgcgctccagtatctgcggaagcaagaactggccgactatgccgcgctggaggccagcaccgagacggcggtggatcgctttcacaagttggccggggagctgcgggacacggaggccgccctctccaaaacggcccggcttatggaggccacggtggactatgccaagacccggcctgtgttcgatggttacaaggcggcccggtacagtaaaaaatacctggcccagcatgaggcggagctggccgcttatcgggcggcaaaggcggccatgaatgaaatcctggacggggcaaagctccccaaaatagacacgctgaaaaaatcccgccgggagctggcggaaaagaaaaaggccctctatgccgagtaccgccaggcccaggcggatatgcgggaggccgtggcggtcaaggcgaatattgaccacctgctcggcgtgacggacgggcgggaaaataaggcccaggagcggtagcgacaggccgcagacaacaggcgcatagcgccgggactttgggacactttgtcccgaagtcctgcgggtttggggagctccccaacaagcatttttgcgggcctgcggcccggcaaaaatttcggagtgtggacacactcgaattgcttgccaaaacgtgcgggcctcggaagtacccgcgttaaaacatcggacttatgtcatttcactcttgtattgttctattggatgtgctaaaataaagttgatttttagaatttgtttttattttgcagggaagaggtgacgggatgccaaaggtagcttattctgaggaggatagagagcgcatcagaacggaactcgttgcagttggtcttgaactgatggcaaaacagggcatacagcatactactgtggagcaaatatataaaaaggttggtatttcacgaactttcttttactctttctttgcaacgaaagaagatttgatcgttgaaacgctgtacttgcaacagcctaaaattattgagcaagtgcaaagactgatggccgatcctgctttaagctggcgtgatgccgtgaaacaatttctctatgcctgttgttacggagagaaaaatggcatcgctgttttaacgattgaagaacagcaactcattttcaaacgtttgtcaaaggaaagctatcaaatattccgtcaaaagcagctccgtctttttggagaaattttagaaacctttggtataaaggcggacgcggcaaggatcaatttatttacgaatttgagtctgacagcgatggttgtacgcaaggcaattcctgatacgttacctctgtttgttcccgaagttgccgatgaaacagttgactttcaaataaacgctattgtggatgccctggagaaattaaaagcaacacctaccgcttgagtgattgaaatgagataatccgtccgaatatcatgtttcggccatatattcagacggatttcattttagccaggataaaaacaaatttggttttttgctcttatttttgagagataaaacctaaaataaaacgcaaaggagaacacgcgatgaaagtatttgatctgttcgtaagcaaatatccaccgggtaatgatttgagaaaacctactgcggaaacgctggagcaatttcaagggaaagtgccagcggagcttctgaacttttggcaggaatatggtttcggaaattatggcggaggtttgctaaaaattattgatccaaccgattatattgatacgctcactctttggctgggcgaacaggaggggtgccttcccattctaatgactggatttggaacgctttttatttaccgcaagctgtctgatacagccgatgatatgtgcctgcttgatactcacaaccgcagatcgggcagtttctctaccagcttttccgatttttttgagcgtattattcctgccgaaaattttgcggcgcagtttctgagagtgggtctatttcaagaagcatttgctaaacatggcggcctttcagaaaacgagattttcttctttgctccggctttggcttttgggggaactgagtccattcaatatgtcgaaaagggaaatgccgttgttcatcagcacttgttgtttgaaatgggggcggatcattccgatgatacagaaccggatgatatgtggtcgcaagcctatgaagcaaatccccatgtgtttgaattggataatggcgggcttatggttagcttcaccttttcggaaactgtggataccatcctgccagtagcaccagaaacgctatatgagattgagggagagactatttctctatgggcgctgactttcgttagtctaacaaaagaggaaaaccttggctttttggagtaccacaaggctttgaaacaattacaaccctacattgtggaaacgagaggagatcacatattagttcgcggcctgagtttggcagagatggagcatattctggcaaagcaataaatttgctttaccgctactttgggacaaagtgtcccgaagtgatatagctactatcaaaattatttcatttatgatgctgtgggtattgccccatccagtttcatataaacacattcaaacatttaggaggaaaagtcatgggattttttagcaagttatttaagggccctgaaattgacatggaaaagagcaacgcaaatgcaaagaaaatgcgtgctctatttaatcaggttgtagagaacggggacaattacagactgattttcggatataccgaggatgtgagccggtttaactatggctttgttcatgggagcaaaacaaagatcggaaatttaattgtcggctggaacgaagccagccagacgattgtggttgttcccacagtacccgatctttccggctgtggcgatccgacctactatcgccgttctgaaattttgaaagcctatcggaacaaataccctaccgatgcttttatcatttatccagacaaaaaaggatacattggcatcaatgcctatgactggctggaagatgaaaagctgtatgtttatgtatcacaggatgatgaattggccgcttttaccgacttctttatgaatcgctttgcaacaaagtgaggtaaaagatgcctattggagaaatcggagcgttcctgctgtttcttgtgatcgtgtttatagttggaaatctatggtttcatttcgtagaagcaattctgcggcagattaaaaagctatttacacgtcacaaaaaacctccggcatggcatccgctccccccggacaaggaggattgaaaatgttcgatatagacgagattaggaaacaggcactcgcttctatgagagaaaccatggaaaagaacgaggaacgaattagcaaaattgaggttcccagctctgaaaaaggcgcatctgtgtctgccgccgaagtggaagaacagattgccgctaatactcaacgtcaagtagaaattcttggacagatgtttgggccagatagtatggctcaaatggctgttaatgaggaattgctgcaaaagatggtaaatgataaagttgctgaggcaacttcagctactgctggggacttgatgggacagcttttcggagaagatatgggcatacttgcggctgctctggaaacgctggaaatggaagatgcggacgatgaggaagaactctcattcgatctggaactggaagaaaagctctatactaccttggaagaaacaatggcccggcttgaggccatgcctgagccagaagcgatcccatatcaaaaagacgatgtaaaatgggaacgctttggcatcctgctgtccggtattttatcgacccttaacagtcacgatctggatagtatggatgtggaggaacatattcctgttatggagcagaaaatcgtgtcccttgtgcgccgctcctgggggatagatggccggagtgatctgctggacatgatccgttatctggcgcaggagggttatatcctgcggtatcagctttatagtgaggcatcttcgccggaggaactcatggacgaaactatggacgaggatgaccgtgagtctacctgccgggcatggaggtttgcacaacggtataaaggtcaatatgctcccggttttatggctggatgggatattggccgggcggcgatgctgacacgctggggatgctatttaggctggatcacagaaagcgaggctgttggtattctgtgggatctctcccaaaaggttgttgaggaactgcatagctggcgcgaatttgcgcaatcttatctttttggcggtctgatgtggaaattgctatgcggtgacagctccgcaggaagttacctgggttatcttgcagacgccgccacagacctattgactggaaaagcagagcaggataacggacaatggcgtgattgcccttggcctgcacagagaaaaattggtttcacattataaatctttttgaaaatttgttgctattcatcagccgccaacggaaacggcatataaaaaaaccgttggcttggcggctgtgttgatgcacgcctaaactaaagttaagcggcggttttgaaattaaccatttcaaggccgccgcctttttatatcacacggcggtaacaaaggaggtacgtcgtgtcccgcacaatccttacccgcccctctaacttatcaaaaaaagccagggccccggacaaggatattttaaccgtagttgtgaaaattgttataatgtaggtgaatatctcaatttatgcgcttgcgcggctttatgtcgtgcaggcgcattttgttatccgtactttgagacaaagtgtcccaaggtgcgggacggccctcccaggtgccgctccccgccggccctccatttcgtttcccctcaacccgaacaaaacgaaatggaggacaagctatgacaaccatcaatctgaaagatttttattattggtacatacaggatcaatttatcgaggttgctgacgaggtggccgaggctctcaccgccagcagacgctaggaggccgcctatgtggagcgggcccggtacaacaaggcatattattccctggactgtgatgacgggatcgaatattccgcctgccagcatgagcccagcccccaggagctcctggatcgcaaggaaatgtttttccggctctggaacgcgctcaactccctgccggagctccagggccgccgggtggatgcccacctcattctcggtaaaagctatcgggagatcgcccgcgaggagggcgtggataaaagcgccgttaggtgctccgtcctctgcgggatcaaacgcatgaaaaaatatttgcgggaaaatttctaaaaagcatctccattaccccctgtttttctggtggtatatgagaggtaggttgcctacctctccacagcaggacggcggcggctccgagcatagcgcggggagccaggcggcgggtgcgcggtgacttctccacaagagaacgagcgaccaacacctgcgccgcaggtgggccgggccatcccacggccacgatccgccacaggacaggctggccgcctgtccctccgggccgctgtctcctgctgtgtgggagtgctgcgccgagtatggttgtctttggacaggtcaaggaaacgggcgcggcctccctctatcttatgaaagcggggcctgctttatgagcagggctccggctggcttcgagacattttgtcccgaagtcccggtcaaaacaagggccagcactttcgcggtgctggcctttgtcatttctgaaatgggaggtattctatgcacgcacagaccaaatacaaaagcgaaatgaaaacggctgtacttggtgatcggacaattactattaaaaatcttactcccattctgcccccgcaggaacgggaaaagcgcaggcgcgaggtggaacaacagctttttgacgtgttccgcaaatatgccggacagcgggggtagtcaaaggcatccttgttgaatgggggcggcagaggtataatataattgtaggttggctcccgtataaacggaagggagctaattatggataatagaatagatgcaatttacgggcggcagtcgattgacaaaaaggatagtatcagcattgaaagtcaatttgaattttgccggtatgaactaaaaggcggtgaagcgaaagaatacaaagacaagggatattccgggaagaacatagaacgccccgacttccagcggcttctgaaagacatccgggccggactgatccggcgggtgattgtttacaaactggatcggattagccgctccattgtggacttcgcaaagctcatggaactgttcaagcagtacaacgtggaatttgtctcctgcaccgaaaaatttgatacgtcaaccccgatgggccgggcgatgctcaatatctgcatcgtgttcgcccaactggaacgggaaagcatccagatgcgtgtgcaggacgctttttattcccggtgtgccaagggctactatatgaggggccgggctccatacggttttgatacggagcccatcgtcatggacggtatcaaaacaaagcggctggttgaaaacgctgagatggactacgccgagcttatgtatgaaatgtatgccgagccggagaactcctacggcgacattacccggtattttaccgagaatgaaatcatggtgtatggaaagacattgaagcgcggctttgtgggccagcttttgagaaatccggtttacgtccaggccgatatggatatttacgaatatttcaaggcccagggcgcgaaaatcgaaagcccgccggaactgttcacaggtgaatttagctgttacttgtaccagggccgcgagggggaggaaaacattctggtgattgcgccccacaagggccgcatcccctcgtccctctggctggccgtccagcacaagctgtcccaaaataccacgttccagaatggccgcaaatgccacaatacatggctggccgggaaaatcaagtgtggatgctgtgggtatgcgctggccagtctgaacgctccaaacggtgtcacttatatgcggtgcaagcaacgcatggaaaacaaaagctgtcaagggcccggcactctcacaaagcacgacttggaaaaatcggtctatgaggaaatggttaagaagatgcgggaatttcaaacgctgaaaggcagtaaggcggaggggtacaatcccaaactgaccgccgcccgcgctaaacttgccaaaatcgagggcgagattgaaaagctcattgacacgctgaccggggcaaacccgcttttgttgcaatacgcaaacagccggattgaagaactggacgcggaacggcaaaagcagttaaagctggtggccgacctcaccgctaactctgtttcttcctcacaggtcgatagcataacgggatatttaagccattgggaagatgtgagcttcgatgacaggcggcgcgttcttgacacgctggtttcaaaagttgaggccactcgcaccgaacttgctattgaatggaagatctaaaacttttcactttgcattgtacccttgtcaagaacgcttacttatcctgcatagcaacggcatcaatactgtgggaaaaccttttagcccttgccgaaatctacaggcgcaaaagataatagaacatgacacaaaaaagggattcatcaaatatacgttcgatactcctacaggagaacacaggagcgttatagtcgatgctgattgcagcgccctgcaacgttacaatttactacaagacaatggttttattgtcgatgcaaatcttccagctaccatttgtgccgagttaattgcacgttatacagcatctggactcgcttccattcctccgcagataaaatactctcccggatggtatttttctgaaaagcactggggatttcaagagagtgaatgggttgatcttaatgctgtgctactgagcttcacagttccgcctacacccgatatgatattgtaccagctcgtatcactatacgcgatacttcaagagcgtttgccttctaagatgtggattcgacgcccaatctgcatcctaacacatgagtatctgtacacagatttatgcattgatagcacaccctacgtattcaaaaaagcactagaaagtttgcgtgaccgtcccattgtatggattcgttctgaaaacatcaacttcaatgagtcttccagtgcctatagtcgggacaaaactatcaagcgctgatgaattctacgcaaagcaaccagaagcaccctctatatatggttgtttcgtctaatcttaccccacgtcagcgaaccttttgtctaccaatacaagattttatcgatccttatgaagctacaaattcgattgattctatcggtgggctaataaattcgattatgaataacgccaatgcattcaattcgacagtggaacgttcttttacaaaagtcttcgatgatcttggcgaagattgttctgtacaacgggaaatcgcagcactatctatgatagctgatgttgtaaagtggcattactccatgcaagtgcctccacaaacgctttccgtccgctgtgacgaataccttgaaacatacactcgctactgggaaagaatcaacgatggcaacatccttacacctttccgaaatgcactctatgcagcccggcgaagtgatatgatttgttttcgtccactcgaagatgtcgatagcagttttgaatgtcagaaggagattctctacgatgatacctattattatacatcgactgcccttttgaagaaaatcattaaggtgcagctgcgatcctatatgccgtccgacgtgctcaatcgtctgaaaactgccggggttctttcgggatcagtccccaaaacgctcacctttgcaccaaatgaatcaaaggattttcgctttcgaacacttctgagaagtagcctacatcaacccggaagtcgtgaccttgttgaaatctaaaaataaaaaggagtttgattattatgtctatgctatcgcaaacctacataggaaagtactatgagggcagccaagaactatccgtttccacaaaaagtatccccggacaggataacgattcttatgtcatcctcggtgaatccggctacggaaagagtgttgctgcccaaagtatcgtgctgcaaaatgccaatcagagctatagcgtccgcagcatcgatattcataactcctctgccccggaacatctctttccaattttcagaaagtcatttgaacatctgtcctcacaaattgatgcatacaacacgccaattccaacaacgcttttcgagccactgcactatgcggatggaactatggaatcacctgcagatttaagttatacgctttccaatattatagctcgccatctcaggttaagccgttcttcaacaaccgccctctcagaatctcttgaatatgcaatttcagaccgcgacaataatccagacatttttccagcagttctcaaagcccttgaagaatttgacacgaaagcatcaagaaacgcaatggcttatcttgcgcctctcctgcggcacaatatttttagacatcagtctgtcaactattctttcggaatcgaaaacatcagcctaagcaagtttccgcccctcttcaagaacgtgattgttgacttacttctttttgatgagtttcgcactgcatcacagggaggacaaccgccacgctacatctacatagatgagatgcagaacctctccatcgacaaggactgttatcttggcaaaatcctgacagaaggaagaaaatactctctgaatgtgatccttgccagccagagtatccgtgagtttaacgcgtccgaaagaacgatgctctgccaagcgaaccacaaacttctctttcaccctgctttcttagaagtaaagtattatgccgagcttctcgcatctccacagcatcgggctgagatttctgaccttttacggaatctggaagttgggcagtgcgtttttcaaggtcctatttatattggggaagaagccaaacccactcgcgctcctatttgtgtgaacgtcagtcatctggaagacattgcatcggcttcattgtcgaaatcgagcacctgattccattgccagcattcaaaggcagaaatttataaccaagtgttcttgtaatataagtaaagctttaaatgcttcgcttgtcaatcatttttaaggaggatttatcatgaacatcccagatggattttttgaaaaccctgtttctcccgagtacgctgatctgctttcaactatgggcgccccaatttactttacagaggctccatgttgccactccggcgattgtggatacatcgattgtagtgctatcacgctgcgtgaccagagcctattctttaactgcggctatgtcgttcctcctttaaacgcccaatatgaggaagtacaacctgatttgcattctttggagcgttatgacttctcaaaaaatgccagatcttccctggtacccttaatcgccctttaagagtcctatatctcaaaaagatatgcttattatgaaaagccacctgtgctttccattattttgcgaaaggagagaaaagttatgattgataagcaacaggattttcttacactaacaggtgcggctcgccgtgcacggagcgaaggttatgatataacataccacggtctccgcaatctcgtagccgccggttacataagtcacgtaccgaacggatcacgtatctacgtgttttaccccaatgtgatccgctttctccagaaggggctcacggctgagcagagcctagactaccagctctcccgcgcccgtaactgatctaaccgttcgccctcagtatcctccgatgctgagggcatttttttgaagcaggaggttcaaatctatgttctgtgaaaattgcggtcatcaaatctcagataccgctaaattctgctctgcctgcggtcatcccgttggcacagcgccatcccccggtgcagtagctccacctgccgttccagccaaacgagaatcgccccggctgaaagcctcatctggcaatggcagcatcacacgaatgtccggaacacgctggaaaccatggctgctccgaatgccgattcccgatcctcacaccggaattacagtcatgaaggctgttggcacctacgtcacccgtgaagaagccgaggcggtacgcgccgaaatgatgaagcgtccggccacaccctatcaggactctaccctgcaggactgcttccggatgttcaaagagtcccgtgaatataagggccggtccgataaggctcgcgagctctatgacattgcgtggaaatatctccgtccgctgtggcacttcaaaattgccgccctctatgcgcaggactttcaaaacatcttagacaagatggccgataacggcctgtctcaaagtatgttggaaaaagagcgtactcttatcagtaagctgtatcgcacagccattggctggcgtgtcgtggatgccaaccttgcatctgtcctgaaagtcgaagggcgcaaatctccggaacgcgagattttcacggacgaacaggtgacgctgatcctgagccagaagaacacgcccaccgggcagatggtaattgctcttctggcctgcggagtgcgtatctatgagctgctgcacttcaaacacgaagattttcaccgcacggaatccggtgcttatctgatcggcggctgcaagaccgaagccggacgcaaccgcatcattcccattctcgactttggcattccggtttttgaacatgcgtatgccacctctgtggaaaacggtccgctctttcccaatggaaaaggcggtttctggaacgaaaagaactggcgtaatcgcaagttttatcctttcctggaggaaatcggcatccagccgaatccttacgacgaaaatggtaagcgcaagccggagtttgccgggaagctcgccacctatacgccctacaccacccgccatacctacgccagcctttgtgaccgcgcaggcgtcaacaaggatatcctgaaacgcgctgtcgggcacacgcccaaatccaaaacgttagatgaagtctatctccatccgaaagcgacacagatgatcgaagcatttgataaggccaatcagctggtcaatgatgaagttctgaccacaacgaaggcataacaacttcaaagagaaaagctgccaatccgtgagaatctttctctcatggatggcagctttctttttttgtttgcacaatctgtgtcaggtctcatcgcttcattcttatttattgcaattcaactttttaatgcaacggcaacagcgttgaattgcatatcgcaaatatgccgttttcatgttgcactactttcttgccttgcgataaaattcagcggtggaactttctccatcagatcctccacgttgcaattcagcgcacgcgcaaggcgaagcagcgtttctgcttgtgctttgttgatgtccttctgtcgctgttcgtactgctggatggtacgcacaggcacatcggactgtcctgccagttccgattggctcaatccggccaatgtgcgcatggctttcaggtttgtttccggctttgccgcacggtacaactcgttcatcttgtctgcaaactgccgtacatccatctcgtggtagggcgtatacagcagccgcactttcgtgatagacactgcctgttcaatctccgcaaagcgcagaccggtcagccactggtaataggcaagagcccaacctgtccagtattccgggctgcggtcgtaggcatacgagggtttctgcatgggcacggcttcgcccgcctgctccaatacagcgcgggcaagttctacaccggacaagcccaccaacacagaacaatccccctgctcgaaccgggcagacagttcactggtcacaaaccactgccatgccgtctccaacggataatgcagatcgttgacaagataatccaacatccgggcaagatttttctgtgcagcagaaagatagcttttatcgtaagcgtggatcattgggcttcatctcctcgtcgagaatcatggtaatataaaggtctcccctctgacggcggttgcgctccacgtcaaaatattggcggcgggctgtctggtcacggaaggcctttttcttataccattctttagagtctgcggtctcatagccgagaaattccagctgttcaaaggccgctttgcttttcagcacgaactgctgccccagcttgcccaagcgcatggcattgcacaactggcggtaagagattgcgccgttgataaaatcagatgcaaaggaaaaatagctgtcatctgccctgtagccaatgatgatatcagcagacttatagtcgaggtgaaaagtgttcatcaggtattctttggcttctgcggccagcggggcagaagtatcgaattcgcggttctccaaaagaatcgtcagccaatgcagcatcgtgtaaccgggagcgttcaaatccagaatggtcaaaccgtcgcattcgattttataccggttagcgtagccattgtggtcgatgccaacgccccactctttggccatgttgggattctcggtgcagtaaaagccaacaccgtaatcattataggtcttaccatagccgaactttggcttttcaataatatgatccgaaccgtgataaattgttttttccacagaaccacctcctcgctccaattatactcccacaggagtatgcatgcaagagctttatgcgatgctgcggcacaaattcggcacctattggaatcaaaccgaaacctatgaagccttgaaaatttatatccagatggatatggatggcttgcaggatgcggttgtccgaatgctggcaggcgaagccataaaaatcaacacgggcactttcagcaatgacatgaccacctttgccagcaaagacgatgttctgaccctgctggtgcatttgggttatctgacctacaatagcatagatgaatccgtgagaactggcacggtgtgacggcttcagatatacaaaaaatcgccaatgcatgagagaaaaatctctcacgtttggcgatttctttttcaccctaaaagcactcttgctctgcgctgtacctctttttcgatcatcttcaagcgatttggcggcagattataacgtgtcgctctgcggtcaaaatggaaatccagcagcttatggagcattgcacggtgacgaggtttcattgcactctttgcagctgcaaaaaaatcatcgtatgcaagcggaagcagtgtgcgggcatattcatcaaatgctttctggttgtcccaaagatccgttccgcccagactgaacagcgagtttccgtggtcaaacagcggtgcgggtgccgcaatcgtgttggtcttattatctaccagcacaccaaagtttccatagtggcggtcggtgttgcagatgattgcatcaaaaaccagcatatcttccagcgcatccacaaagttctgacctaacgtctgataatacgcaaaaattgcttttattccacctttggacacaagttgtccgatgggaatataagaatactctttgctggtgaacagctcacacctggaacaaagcgtctttttcagatcttttgtcagggtgtagcgaatcgcattcacgcccatcacctgtgcaacttgataagcacacagttccgagtacggttcaaatcccagattgctgaaccctgacgtgccacctttataaagatagatttttccgttttgcctgcgccagcatttgggcagcatcccgttggtcgagaactccgggcaggatgcaagcgaagttcgtatgctgctgccatatcctgtaaaggcgattactgccagcacctgactgaatcggttatcgtaaagatttactttttcaaaagtatccccggaaccctctgcatccacccaaaagcaatcattgagtgaaagacctttattggctgcaataattccaagcggtcgattcaaagaaagccccaccttagagagcagagcatctacatacgctcggttcttcggaattgtgcgatgccgcagccagcgttctacaccatcttctgatacagtcagattcaaaggtagaaaagaacggttttctttgtagacctttataatatggaggccagtatctgcactgtccatgtttgcttcaaaggtaagcagcggcaaatcaaaatgcctgatggtgtagcgcacagcgatttctcctttcatccatgatcttttcctttattgtacggcatcagaatccgaatgaaaagcaccgtcgtcattctgcacaaaattcgatgataaaattttatactcaaaaatctgcaaaaatcgggtttctgaggtcattttgccgtttctccccgaattttgctacagatctgctacaaacttgctacaaacgactgaaaagggggcctcctacacgtttcattatcaatatgcaaaagtgaatccgcttcacttttgcatatcaaaaatcacgtaggtacaagaaaaagccgcttaccttttcaggtaaacggccttacgtttggtggagcattgtccacagcactcgaacccaacacttcctcacgggtgaccgtcttggcatcgtccgtgaagttgaagttgagtacgacccggtcatcaaagacgtagaccgagttgacaaaggtatcaatgatctgccgctggtgctccatgtctctcatgtcacccttgcggaatttttcaaaccagaaccgcatccactcgcgggtcaggactggctttttcagctcttcttctagaatgctggtgttcagggcttccttccgggcttccagttcgtccaaccgctgcttggtggtcggggttaggataccctgttcaatggcttccagaagatttgccagccgcttctctgtatcccggagttggtctttcagaacgggcaggcgggtgttctcctgctgctgggcttccatgatcaaatctatcagccgttcgatgatttcatcgctgaaaatcaccttaatggcagtgtccactacgaaccgttccagcggctccttgcggatggctttcaggtcacagtgcgccttgccatggcgtttggcgttgccgcacttgtagtaatagtaggtgtttcccatgtggctggtgccgctttcgccacccatcagggtgccgcacttgccacagaacagcttagtggtcagcagatagctcacatcctcttttgcaggccgaccgtgggcgatcctgttctgctcgaaacgctgctgcacccggtcgaacaaatcctggtcaacaatagccggaatgccgcccggcgtcacaatgtccttgtagcggtattcgccgatgtagcggcggttgcggaagatctggaagaagctgttctttacgaacggcttcccggtgcgggtacgcaggccgcgctcattcagggatgctgcgatcttctcagccggttcgccgtcggcgtaccgggtgaagatctcctgcacgatgggagccgtttccgggtcgatatggtacagcctgtcctccttgccgatggtgaagccaagcggcaccacaccgccgttgtacttgcactggagggcgttttcgcgctcaccgcgcgccactttcagggcaagttcggcggaatagtattccgccatgccaatcagcatactctccaccataatgccttcaggcccctgcgagatgggttccatggcagacaccagatggacaccgttcttttccagctggtacttgtagttcacggcatcgaatcggttccgggcaaagcggtccagcttccagaccagaactacgtcgaagattttctttccgctgtccttgatcatccgctgaaagtctgggcggtcatccgttttggcagagtaggcacggtcaatgtaggtgccgaccacggtgatgccgttcttctcggcgtagtccttgcagtcgcgcagctgtccctcaatggacgcttctcgctggctgtcggatgaatagcgggcgtagatcacggcggtcatggttgcacctctcttcacacatcattttggcgatacttcgtataacctatataccatattttacatcggtttgcaagaagattttaaatcgttgtcactgctcaaaattctgaaaataatgattctgagcttcaaatataaaatagaaaagcggtggtgctcacggtgagcaccaccactttagaagaaagaagttttttgctgcttgtgcgccttaacaatttggaaacaatcacagaaaatcgaatttgagcatattaggtaagggcaagaaccgtcccgtggccacaaattttcaattcttgaaaattcttgcccctttgggacagcttcttgttggggcgtgcctgccccaaaccctgctgtagacggatacaaaaacccagaaaacagctcctacagctcctttaggtgaggtgtttttcaaggcaataatgatagatgccttcctcatccacagaacggcagcaatctgttgcccttgccttgacttcatcgagggcgtttcccatggcaacgcctgtgccgactgcttccagcatttcaatgtcgtttcggccgtccccaaaggcgatcgcttctgcttttgaaaagccgtaatgcgccaaaacagctcttacagcatttccctttccgcaggacagcggaatgatatccactgccttgtcccaccatgcggttatctgtgtggcgtgggttcccaacaggatgcgttcgtattcagaagggctgcaggaacacatgatctgatagatatcctcctcacagagcttgtcgaaatgctcggagatcaccagcttctcgttgccgaaggaaaaatactgctccaagtccgggtctgtcccatttgtcacgataaagtgttcgttgctgatggcagccgcccggtgcatctgcttcagattatgcaaaattctgcgcttgtcgtcagcgtccagtgggttcttcgagatcactgcatccttgctacggacataagagccgttgaaggtcagccagagatcaaaatcaacgccttcaaaatgtgggacggagaggtagcctctgcctgtcgccatgcacagtaagatcccttttgcctgcaactgctgtaaggtctgtacggtttggaatgacggcaccttactgcccaacttgagcaaagttccgtctacatcaaaaaaagcgatttttatcatacggttacctccagtgaaaaactattttccagaacgccggggagcagggtataaaccgatcctccgattcgtttttcaaacagattttttagctcaagcgttttcttccatcggtctatcgttgccggatggacaccgtaccgaagcgttacatctacaaaacgtttttccaaaagacaaaatccggtgggcagcgccaaggcatcgcatagctgtaccaaacggtcgtaatcatcatagacagcggtttgaatgaatttttccataaaacggaaatcttcttttgaaacgtcaaaggttccgatagaagtgtggatatcctggatcataaaagcatgagaaatacagatctgtccagcctttttccatcctcgttccatacagaaacggtatccgtcgatcaaatgacgttcagaacttacccctgcataacgcccgatatcatgcagcagcccaaagcagtatgcctgatctgcatccatattgttgcatttggctgctatatttttacaggcaagggctacaaaacgggaatgtccgatccaatttccgggattctgctgccctgcccaagccagagcggcttctgctgtattgcaattcagctccaaggggaccgtcctttctctcatagcaaaacgcatccgaagatcaaaggttttcaaatatgatatgcacttacagatcgtgcacttctgctactatcattataacgcctacagcctaaaaataatatcttgatgctgtcagatggtgttgttattctgccgtttgtatcggtactgacgtggtgtgcagccgacaacctcccgaaaaacttttccgaaatagcttgaatttcccataccgcaagcagtcccgacctctgtaatagaagccttgctttccgccaacatctggcaggcgatctgaatgcggtatgcggtcaggtaagcaatcggggtcgtatgaaggtgttcacgaaaaatgcgatagcactctcgttcacttgtgtaggctgctgctgccaactccttgactgagaggttttccgggtagtgctcatggatataaatcaacatcagctttattttatcgttgcctccggcagagttccgattggaagagcttacagaatgcgattgctccacaagcattaaccatagctcggtcaggatctctcgcagtttcaactcatacccgaatgtatcacaagacaaacaaaaagattctttgagtcgtttcaggatttctcgccctgccgcatgatccggtaaaagaggaaggatctcaagttgtgggtcggatgtaatgggcagaatgtatttttgctcgattcggcttcctcgttcccctgccagcagagaaacatcgaaaatatgaagaagctgcacgttctcttccgtctgagaaatcgcccttgtggtgtgaagtacgttggaattgacaaaaccaccgcttcccgccgggaatacaagttttccacctggtgtggtgtattcaacgcagccgctttccatgtagaaaagctctaccgcctgatgccagtgccatggcacagtgctgccgatgtagcgatccaacgtggctcttgaggcagtatatggaaagtcctttgcaagctccgggatgcgctcttctctgctgcctgtatggaattctatacaatgtacgtctttcatgtggtgcaccacttcattccagtttattaagccgagtataccatacccgccaatgaaagaacatccctgatatgacgaccaagttcgcacaaagcgaacttgattgtgcaaaacaaaaggcaggataccactatcatagtgataccctgcctttgctcgtttaccgttccgagtagtcctttcgcagaacttccgataaacaaaaaacgtacccgaaccctttttcgtaaagaatcgggttcgagtacgaactgtatggtggagaattagggactcgaaccccagaccccctgcgtgtgatgcaggtgctctaaccagctgagctaatcctccatattcgcttgtgttgtgcgttccgaactggaacgtgattattatagcacggcctttgccgaaatgcaagccctaatttgaaaaacttttacttttttcgaaaccttttttctggctgcaaaaatgccatgccgtgctccgggcgtgcaacattaccgccgggcagccgcaccggctgcgccctgcacaaaaaatgtgcggcaggctgttgctctttacctgcaaatcgtgtatacttgggggcagaaagctgcacaagagaaatcgagggatgaatatgctgacacttcgcgggatcatcacgctggtaatattggctgtgctgtttgcgctggctgtggtctggatctccagacagggcggctggaagggcgagggctgcaacggcaactgtgcctcctgccacagccattgcgaggacccggacaccaaaaagaaataaccaaaacagggctgctgcacgaaacacggtgcagcagccctgttttatgggaaggtttccttttattatacgtttgtgccccagaaacgcccgtgagcgtttccggggcacttttcactgttatttccgttcagaacgcgccgcgctgggcggcgtagacggcgatagtgctcaaaagatcctgcagcgccttctggtaggtggtgcggccgatgtgcagctgctctaagatctcgtcctccgggcgccgctcaaaaaagcgcatccgcagcagatctgcccgcatggggtcatgcacctgatagtagtcgatgccctcatcaatggcgctttgccagcggcggttttccggcgtgcgcgcccagtgacgctcgccgtacctgcgcagagcgttccgggtcagatttcgttgttcctgcgtcactggcgcttcccccttttgggcagttccagcgctgcactgcgcgagaaccggttctcggcatcgaaaaaacaggcgtcccgctcggccatcgtcagccccagcatggtggaaagccgctcggcttcgtccagcttgaactgggtctcgcccagcagcttgtgccgcagggtgttgctgctgatgtgcagcacactggccacatactgcagcttgtagccgctgtcttggatgtaggtgtagatcaggtttgtgtttgccatggcttcgctccttttttgtagttcgccgcatttgaaacaatcattggttgtattatactccgttgttgatttgttgtcaacctaaaattcccaaaacgcgcgggaattgttgattttcaggaaattttctgctatactcaacccagaacattctatcgcacattacaacgcattgtttttaggagaactgccatgtccgatctatctacccgtgtccgtctgcgccgggagcagctgggtctttcgcaggaggagcttgcccggcgcatgggctaccgctcccgttcctctatcaccaagctggaaaaaggcatcaacgacctgccccagtccaaggtagaggaactggcgcaggcgctggagaccacccccgccgccctgctggggctgggcgcaccctgcgcctgtcccccgggctttgagccgctgcccgctatggtgcaggtgccgctgatcggctccatcgcctgcggcacccccatcaccgccgagcagaatattgagtgctatatcggggtgcctgccgcatggcacgcggattttgctctgacctgccacggagacagcatggcacccacaatatgcaacggggacatcgtctgcatccgctgccagcccgaggtggagcagggcgagatcgccgccgtgcgggtgggcgaggaagccaccctcaagcacttccaccggcagggcgatgccgtgatgctgctggcggataacgccgctgtctgcccgcccatgttttacgccggagagcagctttcggagctgcacatcgaaggcaaagccgtgggactttgccgcggcttataagataaggagagaaaggagcagcctgtgttcggcaaaaagaaaatgtcctcatcctacgaccccaccgcccagaaaccggtgctgcggtgcagcatctgcaccggggagcaggtggccgggtttcaggatctgcacaccggccattttactgaggtgcagctgatccgcagcccgcaggaattgcaggccttccgcagccggtacggcatccccgccgactgtcccattgaaaagatctattgagcaaggagttcatcatgcagcaggcacctgaagccatgaccctgaaggtcattgcccatatccataccgcctttcccaccaagttcggcatcccgcgccagagcgggctggtagaagagctgcggggcgagatcatctttaccccggaataccgcaaccccgatgccctgcgcgggttagaggatttcagccacatctggctggtatggcagttttccggcgcagtacgggaaagctggtcccctaccgtgcgcccgccgcgccttggcggcaacacccgggtgggcgtattcgccacccggtcacccttccggccgaatccgttgggactttccagcgtaaagctggaggccattgagcagcgcccggacgtggggccggtgctcatcgtgcgcggtgccgacctgatggacggcacccccatctacgatatcaagccctatatcccctacgccgactgccacccggacgccgccgagggctttaccgggcagacccgcgcccaccatctggaagtgtcctgccctgaagcgctgtggcagaccgtgccggaagccgaccgcgccgctttgcagggcgtgcttgccagtgacccccgcccctcctatcagcacgacccgcagcgggtgtacggcatggagtttgccgggctggaggtgcattttaccgtggacggtgatcagctcaccgtgcgggacatcaccctgttataaaaggagctgttcatggaactgcggactgtcaacacctttctgcacatcgccgagctgcacagcttttcccgcactgcgcggcagctgggctactcgcagtcggcggtgtcctcccaaattgcacagctggaagccgaactgggcaccccgctgtttgaccgcgtgggcaaaacggtgcgtctgaccgatgccggccagacctttttacgctacgcccgcaccctgctggaaactgcccagcaggcgcaggccgccttgcagcccgcccagcaggtgcggggcagcctgcgcattgcgctggcggattccgtatgcagcacctttttgccgggactattgcagcgctaccacgcccgctgcccgcaggtggaactggtgctgcataccgcttccacggacgagatgctgcaattgctgagcaccaatcaggtagaccttgtctacacgctggaccagccccttttgcagcctgcgctggtgctggcggcagacgtaccggagccggtgtgcttcattgcgccgccgcagcatccgctggcgcaggaaagcaccatcccgctggaccttctgccccggcaggaattcctgcttaccgagcggggcatgagctaccgggacgcgctggaccagtgcatggcggcgcacggtcttgccatccacccctatctggagctgggcagcgccgcgctgctgtgccagatggtagagcagggcatggggctttcctttttgccggagtatatcgtgcgcagcgcactggccgaggggcgtctggcgcggctgaacgtgccggactgcaccgtcatgatgcaccggcagctgttctaccaccgggataaatgggtgaccccgcagatgaacgtgttcatcgagctggtgcagcagcaataacggcgcattacacaaaaaacaccgtcgtgcccgcaggcacgacggtgttttttgcttgacattatttgccggcagccgttgctgcctgctccttttccatccattcccgcacacggtcgggacggttggtgatgtaggcatcggcgctggtacgcagcagactgcggacggtatcttccatatccaccgtccacagagacaccttgatacccatctcgtgcagttcgtcaatgaaactggcgtttttgtaggcggtgtggtactcgcagctgacccactccggcacaaagtccagactgcggatataggcgggcagatcccgctgcgccatcaagttcttgtagatctcgttcaggctctcgccgggaaagcttgcccgcagcatactcaccttgtcgctcatccagcgggtcatccagctgcagttttcctcgtctgctgcgctctccggcagggcggtatccatggcttccatttcgtccatgccgttggtcagccccagatccttccagatgatgggcggcggcagcagcaggctttccagctcgccgtataccagcgcgcctacccgcagttccggcagcagctgctttgcctgccgcagcagcgcgtggttgaaggagacaaggatcacctgctccaccatctcggtctgctgcagtacctccagcacccggggcacaaagtccgggtcgttgtccatggtggatttcagctccagatgcacggtgcaccccggcatctgcctgcacagctccatggcctcctgcagggtagcgatcttctcgtccttgaacagtacatccttccagctgccgaaatccagcgtctttagatcgcccatggtcatatcgtagatcttaccggaaatatccgtgtgcagatcgatcatatagtcatggtggatcacaagcccggcatcgctggtctgctgtacgtccatctccacaccgtccgcgcccagctccatggcttttttaaaggcgatcagggtattttccggtgcaaggtaggaagcaccgcggtgtgcaatgatttgtggtgtcataaattttctccgttatcggttcgtcctcacacatggatgccccggcgctgctgttccgcaaacagtgccggggcgttggctcaagccaagtcctcgccgtccgaagcaatgacctttttgtaccagtaaaaactgtccttccggctgcgggcaagggtgccgttgccggcgttgtccttgtccacatagataaagccgtaccgctttttcatctcgccggtggaagcgcttacaaggtcgatgggaccccatgtggtgtagcccatcaggggcagaccgtcctcgttgacggccttttccatctcctcgatgtgcgcccgcaaataatcgatgcggtagctgtcgtggatggagccgtccggttctacggtatccaccgcacccagaccattctccacgatgaacatgggcttttcgtaccggtcgtagatggtgttcaacgtcacccgcagacccaccgggtcgatggcccagccccactcgctggctttcaggtaggggttcttcaccgatgccgacacggcgttgccttccgcattttctgccgccatcagttctttatccaccgtgatgcagcggctggaatagtagctgaaggacacaaaatccaccgtgccctcccgcagcgtgcggtcgtcctccggctgggtgcgcagctgcaccccggcacgctccatccgctttttagcccacacggggtaagcgccgcgcacctgcacatcggtaaagaagtagttgtcccgatcggcttcctgcgccgcccgcacatcctccggggcgcaggtgcgggggtagaactgtcccgctgccagcatacagcccaccatggcgtccggcattttttcgtgcgccagctttaccgcctttgcgctggctaccagctcgtgatgagcagcctgatacttgacctgctccacgttctcgccgggatagaacaccagccctgcgccggtaaaggagaggtgcagcagcatattgatctcgttgaaggtgagccagtacttcaccttgcccttgaaacggtcgaacagcacctcgcagtagtggacgtaggcgtccaccatgcggcggtctttccagccgccgtattttttgatcagcgcaatgggggtgtcaaagtgacagatggtgaccagcggctcgatgccgtacttatggcactcgtcaaaaatgctgtcgtagaaggccagccccgcctcgttgggctgggcgtcatcgccgttgggcaggatgcgcgtccatgcaatggacagccggaagcacttgaagcccatctctgcaaacagggcgatatcctctttataatggtgatacaggtcaatggcttcgtggctggggtagaaatgcgcatcgtcacaatccagcatctccatatagcccgttgccaccgggaaacgatccgggccgaagggggtcacatccaccgtggcaagacccttgccgtctgcctgccatgcaccctcgcactggttggcggcggtagcgccgccccacaaaaagcccttgggaaatttgcccatactctttacctcctcatctgctgtcgtgccccccttacaggggcacacgttctcttatactcttatgataccgcaatcggcggcgcttgtccatgactgcattttgcaaaggtgcgtgcattcggggataaagtacgacttttatcgtcaaaacgccgaaatttcctgctgttttttgcgcacttttcacgataaaaacacaaaacttgcccgtttttcttttattctgttccttttaaaccgcgcggcagtatggtagaatagtagggtaagaactgcgctgcgctgctgcgctgccgagaacatggaaaaatggagtgtttgattatgactgagttcaaacccatcaaagaaggtaaggtccgcgagatctacgacaatggcgacagcctgatcatggttgccaccgaccgcatttctgcgtttgacgtcatcctgaaaaacaaggtcaccaaaaagggtaccgtgctcacccagatgagcaagttctggttcgattatacccgcgatctgctgcccaaccatatgctgagcgtggatgtgcaggatatgccggagttcttccgtcagccccagttcaccggcaacagcatgatgtgccgcaagctgaccatgctgcccatcgagtgcatcgtgcgcggctacatcaccggcagcggctgggccagctaccaaaagaccggcaaggtgtgcggcatccagctgcccgagggcctgcaggagtccgataagctgcccgagcccatctacaccccctccaccaaggcagagatcggtgaccacgacgagaacatctcctacgagcagagcatcgacgtgctggaaaagcagttccccggccacggtttggagtacgctaccaagctgcgcgactacaccatcgctctgtacaagaagtgcgccgagtacgcactttcccgcggcatcatcattgccgacaccaagttcgagtttggtctggacgaggacggcaacgtggtgctgggcgacgagatgctgaccccggactcctcccgcttctggccgctggagggctacgagccgggtcacagccagccctccttcgacaagcagtttgtccgcgactggctgaaggccaaccccgacagcaactacgacctgccgcaggatgtcattgacaagaccattgccaagtatctggaagcctatgagctgctgaccggcaagaagctgtaagcgctttgtaaatcaaacgctcccgttcatcgccacaggggatgaacgggagcgttttctgtttttattctgctgcttcggtcagcacaaaggtcagctctgcggtgacggcgcacttgccgtccacccatgccgaagccttgcctacgcccacagcgccgtgctgctgcaccagttcacagtgcagagtgagcacatccccggggacgacctgcttacggaagcgggcactcttgatgccgccgaacagcgccagcttgcccttgttttccggcaggctcagcgctgccacagcgccggtctgtgccagcgcttccagcagcagtacgccgggcatgaccggctgtaccgggaagtggccgttgaaaaactcctcgttgcgggtgacgcacttgcggccgatggcccactgccccggctcgtagtccagaatgcggtccacgagggcaaaggggtagcggtggggcaagatctccgcgatctgcacgctgctcagggtgttggcgttttcacgcacggtacggggttctgccacgggtcagccctcccatctgcgcagggcgatgcaggcgttgtgaccgccaaagcccaagctgttgctcagtgcgtactgcatctcctgctgccgcccggtgttgggcacatagtccagatcacactccgggtcaggctgggcgtagtggatggtgggcggggcgaactgatcccgcagcgccagcgcggtgaacacggcctcaatgccgcccgcaccgcccagcagatggccggtcatgctcttggtgctgaccacggtcatctcctttgcgtgtgcgccgaacactgcgtgaatggcagcagtctcgcaggcatcgttcatgtgggtgccggtgccgtgggcgttgatatggtccacctgctccggtgcgatatccgcatctgccaaggtcagcttcatgcagtcgatggcgcccacgccgccgggagccggtgcggtaaagtggtaggcatcgcagttggcaccgtagcccaccacctcggcgtagatgtgtgcgccgcgcgctcttgcgtgttccagctcctccagcaccagcacaccgctgccctcgcccatgacaaagccgccgcggcgggcatcaaagggcagactggcagcgtccgggtcggtggcggtggaaagcgccttcatgctggtaaagccgccgatgcccaaggggctgatgcagctctccgcgccgccacagaccatcaccggctcgtagccgtcccggatgcggtggaaggcgtcgcccacggcgttggtaccgccggcgcaggccgtgaccgggcaggtgcacatccccttcaggccgaagcggatagccacctgcgccgctgccatgttggcaatggccatgggcacaaagtaggggcttaccttctccatgcccttttcctcaccgcgggcgtgctgctcctcaatggtgggcagaccgccgatgccgctggacaggatgacgccgatgtttttgccctcggcttccgtatcgatgccgctgtctgcaatggcttcggcggcagcgcccagtgccagcagggtgaagcgcgccatcttgcggacttcctttttgtccaccacggtctcggggtcaaaatcctttacctcaccggccagtttgcacttgaagtcggtggtatcgaactgagtgatagggccgatgccgcatttgccggcacgggctgctgcccagctgtcagctacattgttgcccagcgggttcaccgtgccaaggccggtgatcacaactctgcgtttttccataagggttctcctttacattgccatgccgccgtccacacagagcacctgcccggtgagatagctgctttgttctgcggcaaaaaacgccactgcctgcgccacatcctccggctggcctgcgcggcctgcggggatgccctgcgtcatgccggtgcgcacagtctccggcagcacggcagtcatgtcggtgtcgataaagccgggcgctaccgcgttcacggtcacgttccgtgcggccagctcccgggcaaggctcttggtcaggccgatgagccccgccttgctggcggcgtagttggtctgcccggcgttgccgcgcagcgccaccacgctggaaaggttcacgatgcggccatagcgctggcgcaccatgcggcgggcagcttccttgcagcagagaaaggcgcttttcaggttggtgtccagcaccgcgtcaaaatcctgctcggtcaggcgcaagatcaggttgtcccgggtgatgcccgcgttgttcaccagcacatccacccggccaaaggcctcggcggcggcatcgaacagcgctttgcagccctcagcggtggatacatccgcctgcacggtcaccgcctgcacgccctcggcgcggcagagcgctgccgtctgctccgcaggctctgcgccgtggcagtagttcaccaccacattgcagccctgctttgccagtgccacgcacactgcgcggccaatgccccggctgccgccggtaacgatggcggcgcgggtcagcttttcttcgctcattctgcttccttccatgcggtcagcaccgcatccagctgttccggggtctctactgcggtgcagaccaccccgggcagggtctttttcacaaaaccgctcagggcgctgccggggccgacttccagaatgtggtccacgcccagctcgcccagacggcgcagggtatcttccatgtagacgctgctctgcacctgctttaccagcagctgcgggatgctgtcggtctcggccttttcatgccccagacagttgaacagcaccggcgtctccatggtgccgaagttctcgcccgcaaagcgctgtgcaagcgcatcccctgcgggagccatcagctttgtgtggaaggggccgctgaccttcagcgggatgcagcggcgggcaccggcttcctttgccagcgcagcggcctgctccacagcggctttctcaccgccgatgaccagctgccccgggcagttgtagttgcagatctgcacacaacccgtctctgcagcctgttcgcagcaggcagacagtttttctctgtccagccccagcacggcggtcatgccgcaggcaaggccctttgcggcttcggccatggccttgccccggaaggcggtcagctcgatggcctgctttgcggtgaacaccccggctgcctgcagcgcggagtattcgcccaacgaaagccccgccagataggcgggctttacacccttttccgccagcacggcggtcacaccgcaggcaaaggccaccatgcagggctgggtgtattcggtctggttcaaaacgccgtccggatcttcaaagcagacgcggtgcagatcaaaatccagcgctgcgctgtcaaaggccgcccggaaggcgggagatgcttcgtaaaattccttgcccatgccggggtgctgcgcaccctgaccggcgtaaagtacggcaagcttcataagttctgcctccattcggtcacaagttcgtccatcagctcgcgcacggtgcgcatccggtccagcctgcccacgttttcgccgcagaagaagagcccttcctccacattgcccttcaccgcctcgatgagggcgtgggtgatgcagtagggcacagcggcggggtcacaggtcttgagacaccgggcgcagtgcttgggcgggaagcgcttgccctcggccagcgcctgcaccagcggggtgttcagcgcgcggccgggcattcccaccgggctgtggatgatgcgcacatcctccggctttgccgccagcagcacgtccttgtaggtctgggaggcgtcgcactcgtaggtggggataaagcgggtggcaagctgcacgcccgcagcgccaagctttgtaaagtgtgccatgtcggcaccggtgtacacgccgcccgccacgaataccgggatggcgtggccgtattgttcctcgtagggttttacctccgccagcaccccgggcagaatttcgtccaaggtctggcagcggtctgccagcaggtcctcctcggcaaagccgagatgtccgcccgccttgcagccctcgatgaccacaaaatcggcggcgcggtcaaagccctttgcccagcggcgcaggatgagctttgccgcccgggcgctggatacgatgggcgcaatggccacctctttggtgcccacgatgcccggcagttccagcggcagacccgcaccggagaccacggcatccacccccgccgccacggcggtgcggatggcgtcggcatagtcccgggtggctaccatggcgttgatggccaccagacccatgcccccggcgatggcctttgccttttgaatctctgcggtcagggcgcggtggttggctgccgccgggtcacgggcaaaatccggctcgcggtaacctgcatcggcggtggagatgcaccccatgccgccgcaggctgctaccgcaccggccagcccgcccagcgagacgcccacgcccatgccgccctgcaaaatgggtacttgcaggggcttgccgccaagggtcagcattcggtgttcagcgctgcaatgcgctgcctcccgccctgccacaggtcggcaaggatgtcggccacggggcgtacctcgtgcagcattccggccacctgaccggccatcaggctgccgcttaccgtgtcgccctcaaagacggcgcggcgcaggctgcccagcgtgtatttttccagttccatcttatccgcgcccgccttttcctgccggacatactcccggctcatgcggtttttcagcacacgcaccggtgcacccacagtgcgtccggtgacgatggtgtcactgtccccggctttgagcagcgcggccttgtagttttcgtgaatggggcactcctcgcttgccagcaggcaggtgcccacctgcacaccgcaggcgcccagcgccagcgcagccgccagctgacggccatcggcaatgccgcctgcggcgatgaccggcacgctgaccgcgtccaccacctgcggcaccaatgccatggtggtcatctcgcccacatggccgccgctctcggtgccctcggcaatgacagcgtcaatgcccagcggctccagatgccgtgccagcacggcagcagccaccaccgggatcaccttgataccggcagctttccacatgggaacgtatttccccgggttgcctgcgccggtggtgaccacggcgaccttttcctccaccacgatctgggcaaactcatctgcctgcgggtgcatgagcatgatgtttaccccaaagggcttgtcggtcagctcccggcagcggcggatgttctggcgcagggtatcggcattcatgccgcctgcaccgatgatgcccagtgcaccggcgttggagcaggcggcggcaaactcgccggtggcaatgttggccatgccgccctgaatgatggggtatttcgtccccaggatctcgtttaaaagtttcatggtctttatcctttatattccacgatcatgccgccccatgtcaggccgccgccaaagccgatgcaggcaagggtctggccggggtgcagctggccgctctcagccagctcgttcagtgccaccgggatgctggcagcactggtgttgccgtggcgatccatgtttttgtagaactttgcaccgtcggcgtgcagtgccttgacgcagtggtcgatgatgcggctgttggcctgatggcagaccacccagtccagattgtccagcgtaaggccggtctcgtccagcacggtgtgcaggcacttgggcagggcatctaccgcaaagcggaacaccgccctgccgtccatactgatgggtgccgagcctgcgcggctggggccgccggcatggatggcggcatcgccccgggcacccagcgtgatggcaaaaggcacggaggtgtcggtcagttcaaacaccgccgcaccggcaccatcgccgaacagcacacaggtggagcggtcggcagggtccatcaggcgggagagcgcctctgtgccgatgaccagcgcgtactgcccgcccagcgtagccagcaggccgcgcgccaccgccgtgccgtacaaaaagccggaacaggcggcgttcacatccagtgcggggcggttttccggcagtgccagcgccgcctgcacctgacaggccacgcttggggtggcgtccggcgcggaaagggtggcgcagacgcagcaggcaatgtctgccggggcaagaccgctgcgctgcagcgcctgctttgcggcggcaatggccagtgtggcggcgttttcgccctcggtgcagtagtgccgggtgcggatgccggtgcgggtggtgatccactcgtcgctggtatccacggtgcggctcagctcttcgttggtgaccgtgcggccgggcaaagccccgccggtggcgatcagacgcaaacccttcatgctttcctcatttctccgatctgacggaatttctggtagcgctgctcggccagctgacggccattcatgcggtcaaggctgcgcagctgacgccgcagtgcctcgtccagattgccgaacagtaccccgtgggcgcgctgtgcgccgcccaccggctccgggatgatctcctccacgatgccgtccttgtacagatcctgcgcggtcagcttcatgatctcgcaggcctcgccgctgcgggaggaatccttccacaggatgctggcaaagccctcggggctcagcaccgagtaaacggcgttttccagcatcaggatgcggtttgccacacccagcgccagtgcgccgccggaggagccctcgccggtgaccactgcgatcaccggcacggtcaggccgctcatctccatcaggttgcgggcaatggcttcgccctgtccgcgctcctcggcatccttgccggggtacgcacccggggtgtcgatgaaggtgatgatgggacggtcaaatttttcggcctgcttcatcaggcgcagggccttgcggtagccctccggcccgggcataccaaagttgcagcgcaggttttcttccagcgtgctgcccttgcggtggccgatgaccgtgaccggctggccatggaacagtgccacaccgcccagaatggcggcatcttccttgcactggcggtcgccgcactgctcaaagaagtcggtgaacagtgcatccacgatctcatcgatgtgggggcgctccgggtggcgtgccagaaaaactctgtcctctgcggtcagtgccccgcagccggacagcaaagcgtcctcctgtgcggaaagctctgccagctcggcagcgtggttggtgatatcggtcatattctcgtccgccgggtcgccgcgcaaggcggcgatcttttcatccagcggtgcgagctgttgtaagatgtccttgatcataaggcgctccctcctcaggcgtgcagacgcagcagctgcgccagtgtttcgcgcatttcggtacggggcactaccttgtccacaaagccgtgctcgtactggaactcgctgcgctggaagcctgcgggcagcttttcgccgatggtctgttcaatgacccgggggcccgcaaaaccgatcagcgccccgggctcggccagcatgatgtcgccaaggctggcaaagctggcagtcacaccgccggtggtggggtgggtcagcacgctgatgtacagcccgccccgggcagagaaccgctcgatggcggcagaggtctttgccatctgcatcaggctgaaaatgccctcctgcatccgggcgccgccgctggccgagaagatgatcagcggcaggtgctttgcggtggcgtgctccacggcgcgggtgatcttttcgcccacagtggtgctcatgctgcccataaagaaccggctgtccagcaccgcagccaccaccggggtgccctcgatgcgccccgtggcggtgatgacagcttccttcaagccggtcttgcctgtctgtgcttccagcttttccgggtagccgggaaactgcagcacatcctgcggggcaaggtcggcgtccaattcccggaagctgcccttatccaggatgaggttcaggcggtagtacccgccgatgggcaggtgcaccccgcagttggggcagacgtactgcgccttgttccagatctggcgggtggcgcggcgtccgcactttttgcattccacgaactgcgggtcgttccacacggcacccgcatcccgccgggctttcagctggaaggtgcgctcccgcatactgcccggcagcaggtctttgatactgttcatcgcgtttcgcctcggtcagcctcagacatgggcattgatgtagttgaagatatcgcccacggtcttgagggttgccagctcctcatcggggatggacacgccgcaggcctcttccagtgccatgttcagctccacagcgtccaggctgtcggcctccagatcctcggtcaggctggcctccatggtcaccttgtcctcatcgcagctcagggtatcgacaacgatcttcttcatttcctcgaaagtcatggtagtattctcctttatgttctatggttgtttttaattatttacctaaaagttatgaggtatcgaacacgaccattatagtcaattcgtcggataagtcaatggatttagttaaatatttttatcttttacacttttgtcacagtttgcttcctttttatatagccccctgcacagggcgcaaaaaagccgctgcacagtgctttgtgcagcggcttttcccgcaataataatattattttcttattccagcccgatctgctgggcgtattcttccagcagctcccgctcaaggaagggggtcttgacgccctcgcggtcgcggtaggtctcgtgccccttgccgatgacggcgatcagatcgccctcctgtgcgtgatccactgcgtagtgcaaagcgtccagacggtcggggatctccacgaactttgcgtccgggttgcccttgttcatgccctcgcggatatccgcgatgatgtcctccaccttttcaaagcggttgttgtcctcggtgaggatggagaaatcggccatcttggcgcagatctcgcccatgccgtagcggcgcagcttggagcgattgccgccgcagccgaacaccaccaccagacggtggggcttgtaggcacgcagagtggtaagcaggctctcggtggatacctcgttgtgggcgtagtccagcaggatggtgaactttttgctgatgggcaccagctccacacgtcccttcaccacgcacttgcccagaccatcgtggatggcggcatccggcagacccagcaccttgcccacggccagcgcagccagcgcgttgtacacgctgaactcgccgggcatattcaccttgacgtccatctcgtccttgccggtaacgtggaaggcaacacccagaaaatcgtgggtgcgcagcagctcgtatccggtctcgcggtagtcggccttttcatcgcggccataggtgaccaatttgcaggtatgaccctccagcagagcggcggtgttctcgtcgtcgatgttcaccacgcccacatcgcagcgcttgaacagctgtcccttccagctgcggtactcctcaaaggtcttgtgctcgccggggccgatatgatccggcgaaaggtttgtgaacacgcccacatcgtagtgcacgcccgccacgcgatccatcatcagaccctgactggacacttccatcagtgcggtgtcgcagccggcatccagaaactcccggaaggtcttttgcagctcgtagctttccggggtggtgttggcggtgtccttgtggcgtcccatatagtagatgccgttggtgccgatcatgcctaccttgcggcctgcggcctccagcacgcttttgatcatgtgggtggtggtggtcttgcccttggtaccggtgacaccgatcatggtcatctgacgggcagggttgccgaagaggtttgcgctcatcagtgccatggcatagcggctgttctccaccttgaccacggtcaccccgggcatggcggaaaggtcgatgtcgtgctggataaccagcgcgctgacccccttggcggcgcagtcggcggcaaacgcgtggctgtcccgctgggtgcccacgatgcacacgaacaaaagccccggggcagccttgcggctgtcgtagatgatatctgcgatctcagtatccagactgccctgcacaagggtaaagggcacgccttccatcagttgttccagcttcatacagtctcctccaaaaagcttctttacatggggttttcttcttcgttggccgtcatgcggtcagggtgggtcaggggcagctgctcggtgtccgcttcagctgccggttcggtggtgtcggcagcatccgcgctgtccgcgctgtccgtgctgtcggcggcgtcctctgccggggcgggttcctcaaccttgggcggcaccacatagccggagggcagaataggctcgccctgtgcaaaatagatcttgcgggtgctgctggcgctggtatggctgaagtccagccgcccggtatcggtggggccgcagcccttgccatcggcgttggtcagcacatagcgggcgcggtccagcttataatccagatcgttcagcgtacccagcagcacgctgatacggtcctgatacaaaaaggcgagctgctcggtgtctgccacttccagccgtgtcacatcctgcgacaggccgtattcttccagcttgctcaccagagtgcgcagcgcttccatgcgggcatcccctgtgtctgccgtgctttcgctcccggctgcttccgacccggaggcgcttgctgcgtccgcatcctccacaaggcagaacgcctgtcccggggcggtatcctgcagcttaccgccgtacagggtgcaaagcccctcgggctgggtgctttcctcggacaggatcttccatttgtccgagatcacaagccacttgctgccgttttgcaccgcgtaggcgggcacggcttcggtcacctgcaccaccacggtgttggggtaatcccggatcaccttgatggagcccagcagcgggaaattctgctccagcacagcggccttttcgccgggctcaaagctgaaaatgttctcttccagctgcacgcccatccgctgcaaaatgctgtctgcggaatagcccgcgatctcggtcacctgcttgccgtccggggtctgcacctgaatggaattgatgcggaacagcatggtcatggtcaggtagatgcccgcgccaatgacgcacagcagcatggcaaaggcggtcaggcggcgcagtatccggcggcggcgcagggtggcgcgggtcaccttgcgctttttgcgcttttcccgccgggcagggctttgctgcggggcagtctgcgccgggcgcagacgctggttctggctgcctgccggttgctgccggttcgggtggttctggtttttccggctgttctgcccgctgcgggcattgtttgccgggcggcgctgtttgccgccggacttcgcgttttttggtctgctgcccgccgggcggctgccggcagggtactgggtggtattgctcccctgcccttgcgccggacggcgggtctgggactggggctgggttgggaattggatgctgttatccgcccgggaggagcgcacactgccgttggcactgcgggagggcgggcggctgagcggctcgccgttgtagccgtagcggctgctgccggtgctccggggcgtatgatcctgcgaaggcgcagaggtgcgcgccacatcccggttcaggtcatagggtctggtgttccggggtctgccgttgcggtcacggttctgctgcatcattcgcaccttccttcttgtttattccgggtctgcatcacggggtctttaccagcttgagcagcgccgcagtgatgcggtccagactgtcgtccaccgacaggctgcgggcgtttttgcccatttcggccagcttgccgggctgtgccagcatagtagaaaccgtctgcaccagcttttcgccggtcaggtctttttcttcaatgaccacagccgccccggccttttgcagctccatggcgttgtagtactggtggttctccgccacattggggctggggatcagcacagcggcgcgtcccacggcttccagctctgccagcgtcagcgcaccggcgcggctgatgacgagatctgccgcagccagcagttccggcatattgttgatgtattcctttaccacaaggctatcgccgggggtaaaatccttctgcttttgcagctgctcaaacagctgtacgccgtactgtccggtggcgtgcaggtgcagcaccggcttgtgctcgtgctgctcccaagcgcacaggtctgccaccacctcgttgacccggcgtgcacccagactgccgccgaaggacaggatgacggtgcggtcgcccgcacccagctgtgcgcggatggcttcgcggttcgcggcctgtgcaaacacttccggccgcacgggattgcccaccacaaaggtcttgtccggtgcgcccagcttttccacagcggcgggcacggcggcaaacacgatatccacatccggggccagcagcttgttggtcacaccggggaaggcgttctgctcgtgcagggcggtgtggatgcccattttggcggcgcagcgcaccaccgggccggacacatagccgccgcagccgatgacgagatccggctttacctccttcatcatggccttggccttagggccggagagggccagattccacagggtaatgatattgcgcttgatgttgtgcaggctgagcttgcgctgaaacccggtgatctcgatgtggtggaaggggtagcccgcctgtgtgaccagacggtactccatgccctccttacggcctgcaaagtggatctcggcggtagggtcggcctttttcaaagcaccggcaatggccagtgcgggattgatatgtccggcagtgccgccggctgcgatgagaacacgcatggtgattcctccttataaacgcccggcctgcggccgggcgggcttgcggttttactgttctgtacgggctgcgcgggcagaagccaagtcaatggtcttgcgggcaagttccgcttcccgctcggcgcgggcggcttcccgctgggcacgcatctgctcccgctgctgcgccacccgctcgccgttgcggcctatgttcaccattacgcccatctctgccagcagcaaaatcaggcttgtgccgccggaggagaagaagggcaggctgatgccggtattgggcagggtgttggtgaccacggcgatgttgcagaacacctgccacgcgatctgtgccatgatgccgatgcccaccatggtgcagtacaggttctccgctttataggcgatgagcagcccctgcacgataaacagcacgaacagcacgatgatgagcactgcaccgatgaagcccagctcctcgcacaccacgctgaagatgaagtcgttggtgctttccggtagccagagctgcttttccacactgttgcccagccccagtcccttcagcccgccggagccgatggcgtaaaggctctgcacggtctggtcggtcatcttgctcagatcctgtgtccatccgtccagacgcttttgcagataagggatggagtccacatgggagagcagggtctccagcagggcgcctgccgtgatggcacccgcccatgtcagcacaccgccgctgccggacagcagcaggatggtgcccaccaccgccaccgtcagcacgatgccagacatatgcggctccagcgccagcaggatgaccaccggcacaaggggcagcaccggcaccaccagctgcttccacacccgcacccgcagccactcccggggggtaagcaggacgcggcgctccgggtccagccgctccacctgcggcgcttttgccgcaagatgggaactgaacaggatcatttcaaactttgccacctccgaggattgcagcgtaagcccgccgaagcggatccagcggcggcagccgttcagaggagccatggtcagggtgacggccagcatggccagcacgatgatgtaccccggcaccaccatcttgcgcaaaaagcggtgatccatataactcatcaggaacatacagcccagcccgagcatcatacacagcgcctgctgtttgatgtagtggaagctgtcgcccatgcgcaggtaaccggtggtgtagctggcgctgaacagcatcaccagcccaaagatcataataacagccagcgtagccagccagtcgatcagcagccgggaccacgggcccggatctcgctggaacaccgacaccggcgctctgtgttttttgcggatagtcgccatctgcgctcccttccctctctgtgcccggtcagcaccagcgcagcagcgccagcgccagcacatagccgacagcgctcagcgcaaagctgcacagaaacaccgtctccgggctcattttatgcttttttacccagcagcgccagggcttgccggtgcgctttgcacacagcagctgcgctgccaaaagaccgcccgccgcccagaagggcagcgccagcggcacagtcaggctggtcatgtccagactgagcgggatgcagccgatggcacccgctgccagcaaactgccgcagcagcccgcacccagccttgccgggggaaatgcccacagcagcagtgccaccagtgccccggcaagcgcggcgggcagcaccgccagcccggaaacgcccagaccggcttctatcatcatcaacgccagcatggccacaaaggccgcaccgcacaccgtaccctcgtcccgctcggctacgcgggcacactcggccagtgttaccatcagcaccgcccacaaaaagggcacggcgctgcccagcagcacataccccgccccgggcacgcccagcccccggggcagacagcccgctgcccgcagcagcaaaaggacaaaggccgcagccagtgcttccagcaaaagccgcacatcccgccgcaggcccagcgccgccgggctgcgcatccgggcaacatcttctgcaagacccactgccccaaaggcaaggcttccggccagcgccgtgagcagccgtgtcatcaaccggccctcgctgcccagcagctccggctggcctacgcaggcggcaagccagcccacacccaccgcagccaccgtgcccgccgccgcacacagcccgccccacagcggggcgcgcaggggtgcaggccggggctgctcagactgtaccggctgctgttgttgttcgcggcgttccagcacccgccgcagcggcacaaacaggctgcacaaagctgccgtaagggcaaagcccagcaccaccgccgctgccaaggcgaaacgctccataactcagacactccatttcgccaaatagttatacttccgcttctttatgctcttcgtagaagatatccagcactttttccagtgccatgccgtggctggcctttaccagaacggcatcgccgggctgcacccggctcagcagggcatcggcagcctcgcggtagctgtccgcgtgcagggtctttacccccttggccgcagccaccacggcggtgcgcttggcctgctcgccgtaggtgaccagacagtacagcccgctctcggcggcaaggcgtcccagctcctcgtgtgcttcgcggctcagatcgcctagctccagcatatcgcccagcagggcaaagcggcgcttgcaggggaaatctttaaacatcgccagcgcagccttcatgctgtccgggtttgcattgtagcagtcctcgatgacggtcacgccctcgctgtccaccaccttctggcggcggccggtctgctcaaagtcggaaaggccccggatgaccctcttggcgtcacaccccagacgggtggcggcgcagtaggcagccaaggcgtttgccacattatggcgtcccatggcggggatattcaccacaaaggtgccgtgctcctgatcctccagtacaaagctcatgccgtcagtctcctgccggatggacagggcgcagacgtctgcgttttcatcgctcaggctgaaccacaccgggcgcacatgggcggggagcaccgccttgcgcaggaaggggtcatcgtagttcagcaccagcggcgcaccctccggcagaccgttgcagatctccagctttgccttgcagatgttctcctgactgcccagattgccgatatgggacacgccgatgcaggtgatgatgcccacatccgggcgtgccgcccgcgccagacggtcgatctcgccggcgtggctcatgcccatctcgatgaccgcgtactcggtgctgctttccagccgcatcagggtgcggggcattcccagctcattgttctggttgccctcggtcttgatggtctcgccaaagccgcacagggcggcgtaggtcatctgcttggtggtggtcttgcccacactgccggtcacgcccaccatcttggggtggtactggctgcggtagtttgcgcccatcaccatcatggcgtggtagctgtccgggcaaaggatggccttttcttccggcacaccggacacgggatggttgaccaccacatactccgcgccctgctccagcgcacgggcggcgaaatcatggccgtcgaaccgctcgccggggaaggccacaaaaatgcagccgggttttacctcgcggctgtcggtggtgaccagtgccacctccgggtcactggtcagttttccggcaggcaccagccctgccagaagcttgcttgcatggatcttttccattgttgtatcccctctcgttctattgaatgctgcaccctcatccgtcactgccttgcggcagtgctttatgctgaaagccttgggcgaggatgccgaaaaagctgttttacccacaggtcagagtgatgatggtgccgcgctgcacactggagccgggctcggcgctttgcgcctgcaccgtgccgctgccttccaccacgcagttcagcccggcggcgctcagcatctggcgggcaaagtccgagctcttgccggtcacatccggcacctcggtgcggctgccctcgtaggtatcggtatacaggtagatggtggtgccgtagggcacctttgcgcctgcgtgggggtactggtaggtgaccggggcagcggactggctgctctggctctcctgcagctgatgcttcaggccctgaatattcaggcttacctgcgcgttgctccactcggtgcccacaaggttcggcaccgtaacgatggtaccgctgcggtcctcgccgtcggtggcgatgcccagatagggggctacctcgctgatgatattgcccgccacaggggctgcaaggatggaggaatagtccgtctgtgcgttgttggggtcgtccagcatgacgtagaccagaatttccggatcgttggcgggcagcactgccacgaaggaagccacctttttatagtcgccgtcggcgcggcggtgcatattcagctgctcggaagtaccggacttgccgccgatgcggtagccggacacataggcgtttttgccgccgccggtgccgttgcccacctcgtactccatcatctggcggatgacatcgctggcgctctgactgatgacctgacggcgcacgtttgcgccgatctcctgaatgacgttgccgttggcatcggtgatcttatccaccacatggggggtgaccagatacccgccgttgacggtggccgcaatggcggtgcacatctgcagcggggtgatggccatggcctgaccgaaggaggaggacgccagctgcacctcgcccagctggtcggcgcggtagtactgcataaagttggtctcgctgggcaggtccacgccggtgcgggcggtaaaaccgaaggcatcgaagtagttatagaactgctgcgacccaacgcgctgccccagctgaatgtagtagatgttgcagctcttgcgcagcgcctcggccatgttgagcaggccgtgcgccttgcggcctgcgcagtggtaggtctccttggcaacaccgtacgcgccggagcaggtaaaggtggtgttcatggtcgccacaccggagtcgatgcccatggcggaggtgatgaccttgaacacagagccggggtagtacagctcggtgatggccttgtttttccacaggatatcccggtagtagccggaatagtccgcttcctcgtccagaattttgttgcccagctcgtcggtgatgtagttgccgtcggcgtcctttttatagatgccgtaaagctccggctctgcgtgcaccagctcgttgaggtaagcctcgttggcggtgtagttcagcgggtcgttggggtcaaagtccggcttggaggccatggcaaggatggcaccggtcttgacgttcatcacaatggcgcagccgcggttttccaccgtgttggctgcaatggcttcgttcaggtaccgctccgcgatctcctgcacgttcacgtccagcgacagcaccagattggagccgtccttggcggcaaaggtggtagcgttggcgtctgcaatagcgttgcccaccgcgttgcgctgggtgatggtgcggccatccacaccggccaaggtggactggtaggatttttccagtccgtaggtgccgacgccgtccgcgtccgtaaagcccagcaccgctgcagcaaaagcgccgtaggggtagttgcgctggaagctcttttccgaggacactgagatgcgccccttgcgggaggtgtcggtagcctttttgtgcgccttgttgaagctggtgacgtacttttcaatagaaagcttcaccgcgttgttcaccttggtggcaagggtgacgtaggcagaatccagccgggaaagtgcatcgtaaacggtctggtactgctgctggtactctgccgaggaagtgtccacgctgtccaagctttcgccgtccccggagagcagacgcagggtcagctcccggctcacctcggcgcacatggcggggtccagcgttttggtcacggtgtcgtcatcattggtcttgctggtataaaggatgctgctgtaactggggtctgcccagatggtccacaccacgctggtggaagcaagggtgatgccggaagcatcgtagatctcaccgcgggtggccttgatggtggtatccagcagctgctgctgggcggcatactggcggtactctgccccgtggacgatctggatattatacaggctgcggatgacgatggcggctgccaccaccaccgcaaggatgcccagacggctgcaaatccgacgcacccggctgtccagccgatcccgtccagaagccggacgcaggcggtagcccctgctttttttgttacggaaaggttcttgcattggttctctcctgcggggcgtgcactgcattccgcacgccctgcgctgttatttgttcagactgcggtgtccataaaccgaaaaaagcgtgcgctgccgcacgctttttccgtttatctcacggtgcccagaatgttcaccgcaccggtgtacaaaaagtcggtccattgccgcacggtggactcccggcgcaccagtgcgccgctttcgcccaggcggatgtaggtgatctggctggggtctaccttcatcagacccagccgccctgcggtctcctccacgctggcaatgttggtcttgctgttcagggtgctgttgtagtaggtatactggctctgctcgctgaccagctgcgcttttgcgtcctggatctggtcgttcagctccaccagctgtgcctcgctccacagcagactgatggcaaaacccaccagcagtgctgccgccaccagattcatggcgttatgtacggcggcctgcagcgggttcaaccgccgcttgccgccctttgctacccgcaggtttgctttgcgctgcggctgcggcgccctgcggcggcgcgccgcgttacgatcgtatgctggctgacccatggttcctctcctcctcatgatgccggtgcttccggcatctcagcatttttccagtacgcgcaggtgggcagaacggctgcgccggttctcctccagctcctgcgtatcagcttcaatgggtttgcgggtgataagctttgcctttgccttgccgccgcatacacacaccggaaactccggcgggcaggtgcaggccgtggaccagcggcggaacttgttcttgaccagccggtcctccagagagtggaaggtgatcacgcacaaccggccgcccggtgcaaggtgatcgaaaatggtatccaagccctcttccagcgcatccagttcatggttcactgcaatgcgcagtgcctgaaaggtgcggcgggaggggttcttgtttttgcggcgctctgccgggggcatcgcgcttgctacggtatctgccagctgcagggtggtcaggataggagcagtttcccgcgcctccacgatctttcctgcgatctgccacgcatagggttcctcgccgtagtcccgcaagatgcgggccagttcctcgcggctttcggtgttcacaaggtctgcggcggtctcaccctgctggctcatgcgcatatccagcggtgcgtctgcccggtaggaaaagccccgggcggcatcgtccagctggtggctggaaacgccaagatccagcagtgcaccgttgatcttttcaatgcccagctgctccagtgcctgtcccgcataacggaaattgatctgcaccacggtggcaggcagcccggcaagacgggagcgcgcggtctgcactgcgtccggatcctgatccagcgagatgagtctgccgcccttggcggcgtccagccgcaaagcaatctggcgggaatgtcccgcgccgccggcggtgccgtccagataggtgcccgccgggtcgatggcaagccctgtcaggcactcgttcagcaaaacggggatatgctcaaacgaggccgggtcaaagggctgctgttcttcaaaggccattggcacggcctcctttctcggtttaattttttgcatcagaggtgcagcttgcgcagctgctcggcgcgctggtcgttggtcacggcggcgcggcgggcgttccagacctcggtggcccagatctcggcgtggttgcggttgccgatgatggtcacgtccttttccagcccggcgtagacgcgcagctcggcgggcagcaggatgcgtccctgcttgtccggcaccacctcgcaggcggtgctgaacagatcgccggagatggcccagctgttcatcagctcatcgctttccagcttgtccgccagccgctggacttcctccatgggcagtgcgaacaggcagttgtccacccattccagcaccacaaagctctcgcccatggcgtcgcggaattttgcggggaagttcagccgccccttggcatcgatggtgtaatcataacggccaaaaaacacgcgctgcttccccccttcaggggcgttttcagggtgtatgccctacttttacccactttgccccactgatacatctttattgtagcaaatcaagcctgtgaatgcaagggttttcgggcggctttttgccgcaaaagtccacaaaaaaagtccctgtgagccgtcatttttgctcgcagggactttgttttccgcaatgtgtggaatttgtgtggaaagttggccgttatcagccgtttttcttggcgttctggcgcaggctgttgcggatgtttttaacctgtgcggcgttttccaccatggtgtcctcggtggtgcgcagcatattctcgcagtagtcggtcacggtctggcgcagggtgcgtgcctcggtctgggcagcaacggtgatctcagccgcgcgctgctgggcggccttgacgatctcggcatcgctgaccagaatgcgggcgcgctcctcggccttttttacaatggcctgtgcctgtgcgttggcgctgtccacgatctgcgcccggtcgttcacgatctgctgcgcctgccgcagttcgccgggcagcgcggcccgcacctcgtccagataatcccggatctgctccacatccacgatgcgcttgccgccggaaaggggcacatttgcgctctcttccagtgcatcctcaatggtatccaaaagctcgttcacgttcataaggcttctccctcctgctcagcggcgggctgcatgggctttgtgtacttccacagcagcaccttgccgtatttatactgtttctgcagggtcagactgcccgcctgcgcgggcagcacgatgcctgtttcgctctcgcacagcacgatgccgcccggagcgacacacttttccacggcgggcaggatcttttccagcgtgccgccgcggaagggcgggtccagcagcaccagatcgaactgctcccggcaggccgataaaaaccgcgcagcctcgccgatattcacccggctgcggtcaaacacgccgcaggccttgcagttgcgcatcacgatgcttaccgcctcccggttctcgtccagaaagacgcaccgggccgcaccccggctcagcgcctcgatgcccagctggccgctgccggcatacagatccagcacccgtgccccgggcaggtcgaactgtacgatgctgaacatcgcctccttcacctgcgagagggtggggcgggtcacatcggtgccgggcagtgcttccagcctgcggccccgggcttctcctgcgatcacgcgcatgatgttacctccttgccgtagctgccgcccccgcggcagccagtttgaactctttcgtatcctttattatctcccaactgcatagcattgtcaagagcccgcattgcgctgcgggcggctttgtgctacaatcatagcagcaatattgcgcattttacggcgcatttcagcaaaggagagtatacagcatgaaagttctgctcatcaacggcagcccccacgagaagggctgcacctacaccgccctttcccttattgccggggagctgaaggcacagggcattgaaaccgagatcctgcacgtcggcggtcagcccgtgggcggctgcatcggctgcggcggctgccgcagcggcaacgggtgcgtgttcggcggcgtcgtcaacgaagccattgagaaggcaaagaccgccgacgccttcgtgttcggcagcccggtgcactacgcctccgctgcgggcaacatggccagctttatggaccgtctggcctacgcgggcggcaagtatctggcctacaagcccgccgccatctgctgctctgcccgccgcgccggtaccacctccactcttgaccagctggtcaaatatccccagttcttccatatgccgctggtcaacggctcttactgggccatggtgcatggctcgaaccccgagcaggtattgcaggacgccgaaggctgcgccgtgatgcaggagctgggccgcaacatggcatggctgctgcgctgcatcgaagccggtaaggctgcaggcatcgaccacccgcagaacccgccccgccccatgaccagctttatccgctgagcggaagaattattttaaatttatggattgggaaactccgcagagtttcccaatccattttttcacatacagcccctctcgtgaaaatgatttcagagccccggaacgccgctggcgttccggggctccatttctatgggcgattttgtacaatttttccaagcatttcttgggcaacctgccactggcggcttccgcgcactgcaaaatttctgctgttccggcacaaaaggggcgcgaatgcttttttcgttcataactttgtgataccatacctctataagcatatcactcagacggagatcctgctatggaacactacgattggaacgagggctggctgttcacccccacattcgacccggcgctggtgcgcccggagtgcccggagctttcccttaccccggtgcggctgccgcacacggtcaagcccctgccttataattactgcaatgagaacgactaccagcgcctgtgcggctaccggcgggagttttttgcgcccaaagagtggctgggccgcaccgtgctgcttactttcggggcagtggcacacgatgccactgtgttctgcaacgggcggcggatgttccaccacggctgcggctacaccgcctttacggtagacctgaccggtgcgctgcgtctggggcagaagaacgtggtggctgtgcgctgcgacagccgtgaggatctgaacatcccgcccttcggcgggcagctggatgcgctgacctacggcggcatctaccgcgccgtcagtctggatatcaaggagcccgcctatctgcgggacgtgttcatcgaggcaaaggcggagggcgatttccgcatctacaccgccaccgtgggtgagacggtcggctgcaccctgcaggccgagatccgcagccccgccgggagccgggcggtgtacagcggcgagctttccctgcccatcaccggcacgctgaacaatgtgcacccgtggagtctggagcaccccaccctgtacaccctgaccgtgcggctcatccgccccggcaccggcggtctgcccgaccgggtgctggacgaaaaaacggtgcggttcggcttccgcacggtgcagttcgtggcgggcgggctgtacctgaacggtcagcgggtggagctgcgcggccttgaccggcaccagagctacccttatcagggctacgccatgccggacagcatccagcggctggacgcccagctgctgaaaaaggaactgggctgcaacgccgtgcgcacctgttatgcgccccccagcccggcgtttctggacgcctgcgatgaactgggtctgctggtgttccccgagatgcccggctggcagcacatcggcgatgaggtgtggcaggcgcaggcgctgcagaactgccgggagatggtgtgccagtgccgcagccatcccagcatctttttgtggggtgcccgcatcagcggcagccccgacaacgaagccttttataagcgcaccaacgaagccatccaccggctggaccccacccgccctacggcgggcacccgcagcacccgcaagagccagctgctggaggacgtttacgcctacaatgattattcctacgccgggcgcggcgcgggctgcgagaaccgcgccgccgtgacccccgacacccgcaagggctaccttatcagcgagttcggcggacagaacttccccgccaagccctttgacgatgagccccaccgtctggtgcaggcactgcaccacgccgccgtgctgaacgacagcatcgcccagccgggcgttgcgggcagctttggctggtgcatgaccgactacaacacccaccgggagtttggcagcggcgaccgcatctgctaccacggcgtgatggatctgttccgcaacccgaagctctctgccgccgtctacgccagccagaaaacgccccgcgccccctccgacatcgtgctggaggtctcctctgccatgacgctgggcgacctgcccggcggcgcagccgccgcctgctgggtgttcaccaacgccgagagcgtgcggctgtaccgcagcaacgactttgtggccgagtttacccccgaccgccggggacgctttgccgccctgccccacccgcccatcgagatcaacgattttgtcggctcgctgctggaaaaatacgagggcatggatcacgccaccgccgtacaggctgccgccatcctcaacgagctgcggcgggacgccatggcgctttcacccctttccaaggcgcggatgctctcgctgcggctgagctggaacgagctgctgcggatgtattacaagtacatcggtgtgctgggcagctccgcgccggtgtaccggttcgaagcggtgtggcatggccgcgccgtacgcaccgtggtgcgggagccggtgcagagcgtccggctggaatgcaccgtgcacaaccccctgctgaccgatggccccacatgggactgcgccgccgtcagcctgcgcgccatcgaccagaacggcaacctgctgccctactgcggcgaggccgtctgcctgtccgtggaagggccgctgaaaattctgggccccagcgtggtgcccctgcggggcggcatggcgggcacctaccttgccaccaccggcaaggccggacgcgccgtgctgcactgccgcatggagggcgcactggacaccgaagcggtgctcaccgtgcgcagccgggaagagcaaaacgtttaattttcgtcctttcatgatagatttgcagtctgttcaaaattttatcatggttggctgatattctagaggtacaaagtattccgcagggcggcgctgctgccctgcgtttccgtgtgtaaagccccagagaagaggatgcgaaaacctatgagagaaaaattccgtcaattcatgatcggccgctacggcaccgatggcctgaaccagtttttgagcatgagctccatcgtgatgctgctggtatcgctgctcacccgcgtttccctgttcacatggctgggcgcggcactgctgattttgtgctactaccgcagcctgagccgcaatatctccaagcgcaccgaggagaactaccgcttttacagcctgaaggatcggttcaacaacaagttccgcagcctgaaggagcagtgggccaaccgcaagctgtaccactactaccgctgcccccagtgccgccagaagctgcgggtgccccggggacgcggacgcatccagatctcctgcccgcgctgcggcacccagttcatcaaaaaaagctgagccgccatgttcggatatgtgatcccggatcgggccagtctcagccccgaagcgcagagccgctaccgctcggcctactgcgggctgtgccgccgcatcgacgctttgcatgggctgcggggacggttcagcctgagctatgacctgacctttttgaacattctgctgtgcagtctgtacgatggcgaaacccccgcagacagcggtataaaccgctgtcccatccacccggtacacggtgtactttggcgcagcgccgaccctaccgactactgcgccgacctgagcgtggcgctgcattactacaacgcgcaggacaaatggcaggacgaccgcaatctgctggcgctggggtacagcgccctgctggacaacagcaccgccgaagccgccctgcgctggccgcgccagtgcaatgcgatccgctcgtgtctcgccaagcttgccgagtacgaagccgccggcagcaccgaccttgatgcagtgtccggctgcttcggcgccctgatggcggagctgttcgactaccggcaggaccgctgggcaccggagctgcgcagcatcggcttccatctgggcaagttcatctacctgctggacgcctacgacgacctgccccgcgacaagcgcaggggcgcgtacaaccccctgcgggagctgagcacccacccggactatgaggaagagatgctggacatctttgagctgctgctggcacgctgcgcgcagaactttgagcgtctgccctgcgtggaggacgcagatctgctgcgcaacatcctgtattccggcgtgtggctgaaatacaactgcaaaaacgcaaaacgcaccggaaagcccgatgcgtcttgattttgtgccgatgttccggtaaaataaaacggatgcggtgcagcggcgctgtaccgtcagtataatgagtgaggaagtataccaagcatgagagatccctatgaggtgctgggcgttcagcgcggcgcaagcgacgatgagatcaaaaaagcataccgcgccaagtgcaagcgctggcacccggatttgaaccccaacgaccccacggcggaggagcacttcaaggaggtgcaggccgcctacgacgctattaccaagggcgataccggcccccagatgggcggcaacccctacggcggctaccagcagcagggctataaccggcaaggctatggtcagcagggttacggccagcagaactacggctataccggttttgacggctttgacgggtttgagggcttcgacccctttggcttcggttttggctttggcggctaccagcaggccgggcccagcgcttccggcaccgacaccccggaaatgcaggccgcccgcaactttgtggccagcggccgctaccccgaggcgcgccgggtgctggacggcatgaccggccgcaacgcgcggtggtattatctctcctcgctggccaatcagggtctgggcaaaagcgtggacgctttgcaggatgcccgccgcgccgtgcagctggacccgaacaacaccgagtaccagatgcacctgcgccggatgcagaaccccggccagacctaccgcacccagaccacctacgcccagcccggcgggcttttgcgctggtgctggagcatgattttactgaacctgctgtgcaactgctgctgcggcggctggggcttccgtgggttcaggatgtgatgggaagaggacgatttgaaatggcttccgctatcgggttgcggcactcgcgtcttgctggccgctgccccaacaactcctccctgtttccgccgctggcggcggtcgtcgtcgttgcactctagccattttcagcggaaaaattattttaaatttcgggatagcggaacgcctgcgggcgttccgctatcccattttcacaggaggggtcgtaaagggaaactacctgtcaaccactacgctcctccctgtgaaaaagtagttccgaaacgcccgcaggcgtttcggaactacaaataaaattcttctttccgctatttatgcgcaaagcgaacgcggagcgcattccaaatcgtctgctttaacaaaaaatgctgctgcacgcacggtgcagcagccttttttctgcttacaaatgtaaggggatgctcttacttctggggagcttcgaaagcgatggcggtagcaccggcagcggcgtccacgctcttcagagagatgggagccacctcgtagtgcagggtgtcaaagctctgggtattgccgtcctcggtggtgaactccagaacgtaaacaacgtcagcctgcttgtcagcctcgacatcgcgggtgatgacgatgctctcgccgtcagccagaccctcacctgccaggttctcgcccttgtcctcagagcctgcatcgtacaggtacagctcggtcaccttgctgccggtggtgttgtacacggtgtactcggcagaagcagcctcagcctcagaggaagcagcttcggaggaagcagccacggaagaggcagcagcagaggatgcggtggaggatgcagcggtagaggcagagccgccgcaggcggtcatgccgacagccagtgccagagcggcagcggcaattgcaacagtcttgagcttcatagggaaatctcctttttcttcttttgttggtgtcaggcccccggcagcataccaactgcatcggttgtctgatgtccttccattatacgcacgttgacgaaaaaagcaagcttttttcgtcaaaaattaacgataaaataagaattgttactattttgacatgaatttggcacattttaggagatgtaaacttgaatcatatcgttgacattccggctgtttttctctatgtggctgcgggataacggcgcagataattttattttccccttgacagccgccagccgccgctgtatactatgcatcgtgaacagtgttcatgttgggaggtgagcttacgaatccaatggcaacgtccaaagcggacatcctgaaaaccagccgggagctgatccagcaaaacggctgggcagcggtcaacatccgtgcggtcgccgcagcctgcggggtctctgtgggctgcatctacaactacttcggctccaagaccgagctggtaagcgcggcagtggaaagcatctggaacgacatcttccaccacccggaggatgagactgtgtttcaggacaccctgtcctgcatccagtggatgtaccggcagatggaatacggctgccagcaatatcccggcttcttcacccaccacgcgctgggctttgtgcagcaggacactgccggcggcaagcagcagatgcggcagacatggcagcacattctggatgctttgtgcagcgtgcttcgccacgatgccaagatccgtcctgacgcctttaccgagcagttcaccccggagcagtttgcgggcatcctgttctccctgatgctgtctgcggtggtgcagcagagcttcgacccttctgcggtgctggagatcgtgcgcagaaccatttattaagcagaaaacatcccacaatctttgtgggatgtttttaagcccgaatatgaacatagttcattttggtttcagcgctccgcagaccatactactgcaagtccttttccccacgatgcctccggtacggctctgccgcgccggttcgctataaaatcaaaaaactgcaatcaaaacaaatacaggagaaaaacgcatgagagcaatcattgagaccgttttcgacatcttctatctggtcaccgtgcttacggtgggcatccgcatgatccgcggcagcaaggctggcacccagttccgtctgttcggcctgatggccgttgtgctgggcgcgggcgactccttccatctggtgccccgcgcactggcgctctgcaccaccggtctggaaaactacgccgtgccgctgggtctgggcaagtggatcacctctgtgaccatgaccgtgttctatgtgctgctgtactacgtctggcgcaagcgctaccagatcgaggggcagaagaacgtgaccgccgctgtgtacgccctgtccgctgtgcgcatcgtgctgtgcatgatgccgcagaaccagtggctcaccaaccacaccccgctggcatggggcatcctgcgcaatgtgccctttgccctgctgggtctgctgatcatcgtgctgttctaccgcagcgccaaacagaacaacgataaggctttccgctggatgtggctgaccatcgtgctgagcttcggcttctatatccccgtggtgctgtgggcagacgtcaaccccctgatcgggatgctgatgatccccaagacctgcgcctacgtctggaccgtgctcatcggctacaacgccatgaaggccgaaaccggaaagcagaactgagcctgcacctcccccgctgcttagggtgtatctgaaaagtcgaaaatttagtctatttctacaagcacagctggattttgcgttaaatagccttgaaatccacaaaggattcctgcggctatttgccttaaatcccgcttgtgtttgcgaaatattcgtcattttctttgttttcagatacaccttaacacaaaggggcgcacaagacccggcaaaaagaccggagctgtatcaagccctgaaagggctttacagctccggtcttttgtttttgctatctcattcgccgtccgtcagctcttttacaagccttgtcagggtggctacataggactcgttggagaactgctgctcatacagccggcggcagtcatcgtgcatggcagccagcatctccgggtgctcgatcgcccaagccagcttgtcggccagctgctgcgggtcgtcgtccttgtacaaaaagccgtccacgccctcggtcacaagtcctgccgtgccggtgtgctccgatacgatggagggcttgccgaagatcagaccctcggtgacaaaggtaggcatgggatcatcgcgggaagcgcacaccacgcaattgcactgctccatcagggatttcacctccgggcgctccagccgcttgcggtagaacaccgtctgtgggtaatcccgcaccagactgtccacggcgttgtacatccccttgtcggcggctttgcccacaaagaggaaggcggctttttcccgcaccgcagagggcagcagccggatggcattgcagaagatatccgggcccttgcgaggctccagcgagccgaccgttacaaagagggtgcgtcccccggcaaagctgatgtcatagcgggggaactgctcggcggcgtagtccggcagaccgtagatcagctgctcgatttcaaaatccggccttaccgagtgcatggcggcggtggcatgggagcctacggcgcagacatggatatttttgcccagcgccttggggatgctgtgagagatgaaggggtagcccgcaaaggcatcgtgcagccaccacagcaccggcacaaaagagccgttcagggtgttcaccaccggcgcttccaccaccgtgttggccagcacaaggtctgcgctggtggccagcccccacagggcgctggaagtaacgcagtccgggcgggtgaccacggcggcaccggcgtccagaaacagctgcagcgggccctcgtccgcagggcccagcactactacctcaaagccaaggctgcgcagcaccggcacggcgcttaccagcacgatgggcgcgccggtcatggtcagctcgtggctcaggatcagcgcgcggcgtcccttggcggagaatacgtcctcggcgcacagctcccggcggaagtgcagcagcgcctgcgggatgcagcagctgtgctgcgccatggcgtgggacaggcgcagcagctcggtaacgctgtccctgccccgggcggcggcgcgcaccttgtccagcagtgcccgggacaccatggcgcagctgctgccgggcaggtgccgggtgctcaggtacagggcggtagagccgtcaaagccaaaggaggcatcgcagactgcaaggtctgccccctcccgcagggcagcggcaaaataggtcagggcggtagggatgcattccacatcctcgctcaccagcagcacccctgccacatcgggggtcagctcgccctccagcgcagtcaccagacggaacttgcggtgcagctggttttgcagcgccgtttccagcgccttgtgacgccccggcgcatagaccagaagataggtgctctgggtatcggtataggcctgcttggacaattgcttgcgctgcaggttactgtaactggtgtacatcgatccaactcctccgggcagaatatcaggcgggctcagtggccgcgcagcagggtcagcagtctgcgcagcggagcggtcagccgccagctgctgctggcgcgtatcgtttccagcgagacctgatattcgtgctggatgccctgcaaagtcagcagctgctggttcagccgcatacattcggcgcggctggcctgcagcatctcatcagcctcctgcgcggcggcagcattcttcagcttcagctcgttcagtgcccgcagcagagatttgccgggctgctcgtgcagaaaacgccccagcgggtagtagtggtagtttaccgcaaacttcatgccggcgctaaagccggtggtgcaatgcagcaaaaggttcgggtccacatccaaaaacagcaggcagtcctcctgcagcataaggccgttgaccgactgaaagctgatgcgctcgtccgaaatggcaaggtcggtgatgcagcaggccagctcgccgggatccagccggacagcgcgggcgtcctccggcagaacaaaggtgaccgacacctcatgggtcagctcgttgtgggcgtcctcggctgcgatcaggcattcccggggcgaaaagccgctgccggtgtcgtagaacagctgcggcagggtgagggtaaagttatccgtctccgtgctgtgcttggcaagctcggtctggcagaccagcagctgctgctccagctccagacaccgctgtgccagctgggaaacaccctcgtccgagagcctgagctgctgctccagctctgcaatatgcgcctgcagggcagcaggggtcgcggggagttcatggttcataacgggatcctcctcttccttatcctataagctcagctgcgccgccgcagccgcaatgtgctgaaagccgtttgcataagcattgcaagcagcttccgaaagatcaatgccgcgcagtgtagtgcacctgcggggtgtgccgccgggcagggaacagccggatgatcagctcccgccgccgctgcagcagggcacagaccagccagatggagcccaaagaaaaggcatattccagcccgatgcccacaaacgggcggtcggcgtattttgccgcaagcagataccacggaatggcggtaagctccacggtatgtatgcagaagatatacaaagagcggcgtccgatggcctcaaaaaagctcaccagcgcgttccggtgccggttcagccgcagaaacagccggacgaacagcaggccggcaaggccgtccagcaggatgctgatggggcctaaggtccactctgccatggaaacgcagtcggtgctgccggtggcaaaggcagccaccgggatcagcagaacagctgcccacaggatgcaggacatccggcgggacaagggctgatccagccagtgctgccgcttggcaaggtagccgatgtacaaatacggcgtgatcaccgcgccctggatcaggcagaaaggcagctcccacgcaaggctggtgccccagcccagcagggcggcaccgcccactgcccacgaaacgtaccgctccgggaagatgttcaggatgacgtccagcaggatccagcccaccagcagcgccagcagataccacatgggcccgcaggaaaagaactcctgcccaaagtaggtggccgtatggggcagacccagcagaaagccgcccgccaccttgatgctctcggtcagcgagccgggcaggtagtgaaaggtcttataatgaatgataaaatgcagcaccgtggtgaacaccgcagtatagcaaaagggcttgagcagacttttgagctgctggtggatgcatttgtggatagagcgcttgcggaagccgtagccgctggcaataaaaaaggctgccatcagcgtttcgcggtagataaagcaaaaaaaggcggtcagtgacaggccgttcgacagctggagcggataaagctctacggtatgccccagcacgatggacagcatccctgcgcccttgagcatatcaaacatcccgatggagctgacagtgcggggcttggttgtttccatgaaagattccttccctgcgccgggcagatacccccctcgagaaaaagccggatacggcgcaaatgatcagtttttatgcagcattgccatgatatatggctagtataatgctttttggggagactgtcaattttgttttgcagtccgcgccataccggaactggtattttgcgctaaaaattgtagcacaggaaccggcggattgcaacgaaaggtagaatttggccagactgcgccaaaagatacgcaacaaaaacttgtcaagataagaaattaaatgttgcagaagtattgcattgcgctggaaaatattgtatactgggcacagttgagcgcccgggctgcgccccgaaggacggggccggacactgggtaggacaaaatgctccgggaggttaaaattatggtcacatcgctgtatcagtcactttgtaatatggaaacgatctatgcggaccacgtggcgatccggtattatgacgaggcaaaacagggcgtaacggaggtgtactaccgccagtatgcccaggatctgcgcaggttcgtcagcttcctgcgcagtaaggcaggggatgtcaaggggcagcgggtcgcgatcctggcccgcaacagttaccactacatcatctgtatgtacggcaccgtgctggcgggcggtgtggcagtgccgctgaatatgggcaagaactgggacgagatccagtacgagctggatctggtggagccggtctgtgtgctgcaggacggtgagtatctgcagtgggagcctgccctggcggatgcctacagtgcaaagctggagccgatggatgcctttaccgcctttgcccccgcacaggatgtaaaggaagtggaagatcttgccgcgatggcctttatcatgtttacctccggcaccaccggccgcagcaagggcgttatgctgagccagaagaacctgtttgcggccatgcccgccttcctggatccgtttgatgatgtgcgcaaggcgaccggctgggacaccgataagttctgctcgctgtccgcgctgcccatgttccacatctcggccatgaccagcctggtatcctggagcattaccggccactgcatcaacctgtgcaacgacctcaagtatttctaccgcgatatcggcgcgatgcacagcgaggtgatggctgtggtgccggtgctgctgaagagcctgtataaggatgtgatgaagggccgccgcgaccgcctgaatggcctgtgcgtcctgacctgcggcgcagccatgttcgaccccaagatgctcaaggacctgatggacaagggcttctttattgcccagatgtacggcctgaccgagacctgcggcgatggtgcctggaactcctcccaggaggaaaagcacctgaccagcgtgggccatgtggacagcagctgcgagtataagctggacgatggcgagctgtgtatgcgcggcacccccatcatgctgggctactataaggaccccgaggccacggctgaggtcatcgacaaggacggctggttccacaccggcgacatcgcccggctggaagaggacagctatatgtacctgactggccgcaagaagaacctgatcattctggacagcggcgagaacatcagccccgaggagctggaggatcttgtggaaaaatgccccgccgtgcaggaatgcatcgtgaaggaaatgggcaaaaagatcggcgctgtggtgtactgcccgcaggacaagcagcagactgtgcaggatcatattaccgagatgaaccgtaccctgccgctgtataagcgcatcggcgtggtggagttcagtgcagagccgctgccccgcaacgctacgggcaaattgctgcgctgagtataaaacaaacagaacaaaacaggatggaatctacaatggaaaaattcgtgagcacgatgtacgatgccattacgcagggcatggaaaaggaatttcccgagcgcgtggccttccgttactacaccgaggagaccgacatggtgaccaccgtcctttttaaggagctggcacaggatgtccgccggacggtcacctatctgcagagcaccatcccggacgcgaagggcaaaaaggtctgcctgctgagcaagaacagctacgagtatgtggtaaacaccttcggcgcgatcatggcaggctgcgtgctggtgccgatgaaccagcgcaagagctgggcagagatgtcccacgagctggagctggtggagcccgccgccatcctgaccgacggcgaggactacggcagcaaggagcagctggaggccgcctacggcagtctgctgcatcccatggacgagttccgccgctatgagccggcggcggagctgcaccccatcggtcacgacgacctgatggtgctgatgttcacctccggcaccaccggcctgagcaagggcgttatgatgagcgagcgcaacctgttcagtgcaggtcaggtgctgtgggccatctccgcacagctggcagacaagatcgatctgacaaagcccctgcccggccactacatggtgctgcccatgttccatctgggtgctttcatcgacctgttctccaccaccgtcatgggctggccgctgaatctgggcagcgatatccgcgacttctaccgcgatatccagaagatgcccagccagatcatgtctgtggtgccgatgatcatgaacgccctgcacaaggacgtgatgcgcggacaccgtgaccgtctgggcgatctgtgggtgcccatcggctcctctgccatgtttgacccgcaggtgctgctggatatggtgcacaacgggatgttcgtcatccagtgctacggtgctaccgagacctgcgccgccggcatcatcaactttgcacaggacgaaaagcacattggcgccgtgggtcagggcagcaagtacatggactacaagatcgagccggacggagagctgtgtatgcgcggcgactgcgtgatgatgggctactataaggacccggagggcaccgcagaggtcatcgacaaggacggttgggtgcataccggcgaccttgcccgggtggacgaggacggctactactacatcatcggccgcaagaagaacctgatcattctggacagcggtgagaacatcagccccgaggagctggagagcatggtagaaaaatgtcccgtcgtacaggaatgtatcgtaaaagaactgggcaaaaagataggtgttgtggtatactgtgaaaaggagcaccagcagaccgtgcgggactttgttacccagatgaaccgtactgtccccctgtacaagcgcatcggcgtggtggagttcagcgaaacaccgctgccccgcaacgctacgggcaagctggtacgcaagtaaaacgcaacagaaaggaagcataatacgatggaacgtgcagaaatcatttctcagatcacggctattctggaggatgtcgcagaggtatcaccggaggatgtgaccgaaagcagcgtcctgatggacgatctggatctgtcctctatggagatcctgaccattgtggcagatcttgaggagacctttggtctgcgcatcccggaaaaggagctgcgcaactttgtcaccatgggtgatctggtggattatctggcagcaaacgtggggtaaaaccaatggaaacacaacagcgctcgacggaatataactttcagggtgttatgtattttttccgtcgggaaaaagtccagtgccggtaccagttctcgctgcgggatgcggtggatctcacccttttgcagcgggcactgacaacggccttggcaagtgcgccttattatacccagcgtctggtgcaggaaaagcgggagatgtggctggagcccaacactgagccctgccttgtgtaccacggcagcaccatgcgcaatatcccggaggaaacgaacagctacctgttctgcgtcagctgcgaaggggataccgtctattttgactggcaccacttcctactggacggccacggggtatcgcccctgttcaccagcattctggagcagtactgcaacctgcgttacggcactgcctttgcggtgcagcagatcgtgtgcgacccgccctatgatatggatgccatgctggcagagcacccgcccgtggagggcgggagcgacgccatccagcgggacgtggtgcagacctacgagggtacgctgcgccgcacccgggtgtgcctgagcaagcagagccttgtggaaaaagcactggcaaacaacgcaaagccggtaagcgccctgatgggtctgctgtgcatggccatgcggaagtatctgggcaaggagaagatccagtattcctactcctccgatacccgcgatgtggctggtgtgccgaatgcgctgtacaactgcgtatgcagctttgagcatacggtgcagctgcaagctcagacccgccttgcggattttatatctgacgtagatgcagacatcaagcgggacttgcagccgcagtccaagcgccgccgcatgaccgagcagatgggctgggtgtacaaggtgaatcagcaaaaagcccccctgcgcatcaagcagcgggtgttccagatgggcgagtacatcggcggcaccatttcggatttctggctcagctatctgggcaatccgctgatgcccgccaccccagagctggcacagtacaccacggattttggtgtctgggtgccgccggatggcgcatccgtgggcgtggaagccgccagcctgaacggaaagatcatcctgtgcatccacaacaaggcaccccacccgggcctggccgatattctccgcaagacctttgaaaacgaaggtgtcaccgtgctggaagccgccgatctggactgagaagtacataaaaaaaaacaaaaaggatcgctgcaccttatgggtacagcgatccttttttcatgccgcagccgggtctttcctttttatcaaatcccccaaattgcccaacaaagttccgcttccgttcacaaagggcggcgggagatgtgctatactgattccagaatttccagttatgaaaggagttttgtttccatgagccaagccgccgcgcagcagccctcccgcaaaaagaccgtgatctctctgctggtgctgctggcacttacctgcatcatcgtgttcacttttaaggatcactgggccgagatcactgcggcgctggcacagctgtcggtgtggcaggtgctggcggtactggcggtcggcatcagctaccccctgctggaagggtgcgtggcgtgggtcatcgtgcgcagccgtctgccgcagttcaccctgcggcaggggctggatgtgggctggtgcggcacctttggcaacgtggtcacgctgggtgccggtgcggtgccggtgcagctgtactacctgcacagagccgggctgccgctgggccccggcgcaggcctgatgacgttggaatacgttttccacaaaagcacggtgctcctgtatgccaccgtgatgctgctgttgcagcgccgctggcttgccgccaacactaccggtgtcatgcgctacctgcccatggcatacgctgtggtagcggtaattatcgtggcgctggtgctgctgtgcgtttcgccgttggtgcaaaacctcgcccgctggctgctgggctttctgcccaagaccgaaaagtggcagcagcgccgcgccgactggctggagcagctggaagtgctaagcaccgagagccgccgactgctggcagataagccccgctgcctgaaaatttttgccctgcaggcgctcaagctgttcgggctgttctgcctgccctacctgtgcatccggttcatggggctttcgccgctgggcttctggcaggtgcagctgctcaccagcctgatgctcttcgtctccaacgccctgcccaacgtagccgggatgggctcgatcgagaccgcctttctgctggtgttcggcagctttctggagcagggcgaggtgatgagcgtgctgatgctctaccgcatcgccagctattatgtggtatttgccgccagtgccgtgggctttttcatcgctcagcggcatctggcgcaaatggagccgccaaaggaggggtgagcagatgaaaagcttccacattccccgcaccgctttattttttatcctgtttgcattggcagcttttgcggtgctataccatcccatcgacctgaaagcactggtacgcgccagctcgcagggcacgctccgcaccgaggaagtggcgcattttggcagcacaaacgacatggactatcacctcctctccatggacagcgaagagttccgacaaacggcagaattgctttccaccgtctcctgctgcaaaaagctgaaccagaactattctgcctacacccacgataccttcccggtgcagtcggtcaccgtcagcttttatgacgatgccgaaaaccagaagtttctgctgacggtgtactccgatggcgtgtgcatcctgaacagcacctttgtcagcgtaaaataccccggcggcggcgcagcgcagctgtatgaacagctggcggggatggggaagtaaaaacgagactcccccagtctgctcccgctggtcgcagccagccccctcggagatggggcctttggcataacggcacagtttcctgttaaaccggaaagttttccgttgcgccagaggctccctcccagagggagctggctttgcgcagcaaagactgagggagttttctcacaaaacaaaaatcggggcactcaggtggtcaagctgagtgtcccgtttttgttttctttgcgtcggctgtggtaccaaacacagccggtgccgcgccggaagctgcagagcaaaccgtgctgccgcttcccgtagaaaagagaaaggaatggaggaatggagcggagcgcttgcagacgctcctttttttctggtgcaacgtggttagaattagctaaccaccgctgcgagaacagaataccacagtcagttagtcttgtcaaccctcaatttgcaaattttttcgcaaagttgccgtgccgccggggtttcggcgttttttctacattctgcccaaagaatagcctttccgctggaagaaaacccacttgttttctattgctttttaaaacggttcttgctattatagtaacgcaagattttgtgggcaggtttttatttttgtctacaccttgtagtaagggctgccgcagccggcagcgcaagaccgtttcgcccccagaaaaccgcccagacagagcggtttttcaaaggctcattagttagaaaacgctaactgcgtaatggagcaaggaggttccaatgatccagtttgaacagtgggaaggctttgaaggccgcatctggaaggaagaggtcaacgtgcgtgacttcatccagaaaaactacaccccctatgacggcgacgaaagctttctggcaggccccaccgaggctaccgataagctttggggtgctttgcagcagctgcagaaggccgagcgcgccaagggcggcgtgctggatatggagaccgaggtggtcagcagcctgacctcctacggccccggctatattgacgaaaacctgaaggatctggagcagatcgttggcttacagaccgacaagcccctcaagcgcgcctttatgccctacggcggcatcaagatggccgagcaggcctgcaccacctacggctaccagccctctgccgagctgcacaagatctttaccgactacacccgcacccacaatcaggccgtgttcgatgcctacaccccggagatgaagaaggcacgccacacccacatcattaccggtctgccggatacctatggccgcggccgcatcgtgggcgactaccgccgcgttgccctgtacggcatcgacgccctgatccagttcaagcaggaggatcttgccaactgcggcgacggcaccatgaccgatgacgtcatccgtctgcgcgaggagatcgcccgccagatcagcgccctgaagggcatgaagaagatggccgaagcctacggctacgacatctcccagcccgccaaggacgccaaggaagcctgccagtggctgtacttcggctatctggccgccatcaagacccagaacggtgccgccatgagcgtaggccgcatctccaccttccttgacatttatatccagcgcgatctggacaagggcatcctgaccgaaagtcaggcacaggagctcatcgaccacatggtcatgaagttccgcatggtcaagtttgcccgcatccccagctacaaccagctgttctccggcgaccccgtgtgggcgacgctggaagtgggcggcatcggcatggacggccgcagcatggtcaccaagaactgctaccgcttcctgcacacgctggagaacatgggccccgcaccggagcccaacctgaccgtgctgtactcctctgccctgccggagacctttaaaaagtacgccgccaaggtgtccgtcaacaccagcagcgtccagtacgagaacgatgacgtgatgaagcccgtctggggcgatgattactccatctgctgctgcgtgtctgccacccagaccggcaaggagatgcagttcttcggcgcacgcgctaaccttgccaagtgcctgctgtacgccatcaacggcggtgtggacgagaagagccacgagcagtgcggacccaactacgcccccatcaccagcgagtacctgacctatgacgaggtgctgcccaagtatgtgcagatgttggactggctggcagggctgtacgtcaacgtgctgaacctcatccagtatatgcacgacaagtactactacgaggaagccgagatggcactcatcgacaccgatgtgcgccgcacctttgccaccggcattgcaggcttctcccacgtcatcgactccctgagcgccatcaagtacgccaaggtgaaggtggtgcgcgatgaaaacggccttgccaccggctttgagaccgagggcgacttccccaagtacggcaacgatgacgaccgcgccgacgagatcggcgtgtggctgctcaagaccttccttgagatgatcaagaagcgccacacctaccgcaactccgaggctaccacctctatcctgaccatcacctccaacgtggtgtacggcaagtacaccggcgctctgccggatggccgcgctgccttcaccccgtttgcccccggtgctacccccagctacggcgccgagcagaacggcctgctggcctcgctgaactcggtggcaaagctgccctaccactgggcgctggacggcatctccaacacccagaccatcaaccccgaggcactgggtcacagcgaggacgagcgcgtggagaatctggtgcaggtgctggacggctactttgatcagggcgcacaccacctgaacgtgaacgtctttggcaaggagaagctgctggacgccatggagcaccccgagaaggaagagtacgccaacttcaccatccgcgtttccggctacgccgtcaagttcatcgacctgacccgtgagcagcagctggacgtgctggcacgcacctgccatggcgtcctgtaagacccttgggtacgtccactcgctggaatccttcggttcggtggacggccccggcgtgcgctttgtggtgtttttgcaggggtgtgccctgcggtgcaagtactgccacaaccccgaaacatgggcagagggcggcgaggaatggacggcggaagcgctgttccagcgggtataccgctaccgcaactactggggcaaaaagggcggcatcacggtcagcggcggcgagccgctgcggcagatggacttcctgaccgagttcttcacgatggcgcgcgccaagggcgtgcacacggcgctggacaccgccgggcagcccttccgcccggacgacccggcgtatctggcggcgttcgaccgtctgatggcgtgcaccagtctggtgatcctcgacctcaaagagatcgacccggaacgccaccggcagctcaccggcaaggacaacgccaacattcttgccatggcgcggcacatctccgacctcggcatcccgctgtggatccggcacgtccttgtgcccggtctgaccgatgacgaggaggggctgcgcaaaacagcagactttatccgcagcctgaaaacggtgcagcgggtggaggtgctgccctaccacaccttagggctgttcaagtggcagaagctgggcatcccctatcccctgccggacgctgtgccgcccaccgcagagcaggtaaagcgggcagaaaaactgctggaagtgagccggtatcccggttaaagaaagaccattttaattgcgctccgcttcgctctgcgcaagttcagcggaaagaatatctatgatttcggactcccggagcgtctgcggacgctccgggagtccattttcacgggaagggtcgcagcggcaagcgacatttgcagcgccgcttccttcggaagcgcggcgctgcggaaaaatcttgcgatgccgtttgcctttacaacccctcccggttcttcgttcctccttgacttccctgtgccgcaccgctataataaaagggtaaaaggataaatgcgtttatccgggcagagtagcgccgcacaccgtctgcgcagagagaacaggccactggctggaagcctgtttgcagaccgccgcgcaaagtgcgcccggacagcacgcggcgggaacccctgcggggaagtatcgccgtgcggtgcgccgccgttaccggctttgagcgacaaacagaagtggaaccgcgattttgattttaaaaccgccttcggagctgtgctgcgtgcaccgctccgggggcgttttgttttgcggcttctgtttggaacaaaaaggagaattgaccatgcagatcttcaacaccctgacccgacagaaggaagaatttgtgccgcaggtgcccggcgagtaccgcatctacgtctgcggccccaccgtgtacaactatatccacatcggcaacgcacgcccgctgatcgtgttcgacaccctgcgccgctatctggaataccggggcaacaaggtgatctacgtttccaacatcaccgatatcgacgataagctcatcaagaagggacaggaagagggcacctccatgaaggaggtggcacagcgctttgaggccgagtacctgaaggatgccgccgggctgaactgcgaaaagcccactgtgcagccccgcgccaccgaacacattccccagattttggatatcgtcaaggatctgatcgactccggccacgcctacgttgccaagaacggcgatgtgtatttccgggtgaagagcgaccccggctacggcaagctgagccacctgaatctggacgatctggaaagcggcaaccgcgagctgcgcagccgcatggaggacgatctgaaggaggaccccgccgactttgccgtctggaaggccgcaaagcccggtgagcccgcatgggaaagcccctacggcatgggccgcccgggctggcacattgagtgcagcgccatgagccgcacccatctgggcaagaccatcgacctgcactgcggcggtcaggatctgatcttcccccaccacgaaaacgagatcgcccagagcgagtgcgccaacggctgtgagtttgcccgctactggatgcacaacggctttatcaacgtggacaatcagaaaatgtccaagagcctgcacaacttctttaccgtgcgggatgtggcaaacctctacggctacgagcccatccgctatttcatgctgaccgccggctaccggatgcccctgaactacaccgtggacctcatcgaaagctgcaagaacagtctggagcgcctgtacacctgccgcgagaatctggactttgccctgagcaagaccgacttcggcaccgacgagactttgaaggaaaaggccgccgaggcacgcaccaagttctgcaccgccatggacgacgacctgaacacccccgatgcactggctgccgtgtttgatctggtcaaggagatcaacaccctgtccgccgcttccagcaaggccgcactggagaccgcagccgccgcctttgacgagatcaccggtgtgctgggtctgctgtacaaccgcaagaaggacgaggtgcccgccgaggtgaccgaactggtggaaaagcgcgctgccgccaagaaggccaaggactgggccaccgcagacgccatccgcgcacagctgaccgagctgggctgggctgtcaaggacaccgcacagggtccccagctgagcaagctgtaaaacttagcgccgcaagcgcgctgtaacaaaaaagaggacgccgcacgaagcggtgtcctctttttgctgcttatgatattgtcaggatcagtggccgcagctctcgcagtgctcacaatcctcttccagcttgcccacgatgggttccggatcgatgccctgacggcggtagtagtcggacagagcagccttgacagcctgctccgccagaacagagcagtgcaccttgaccggaggcagaccttccagagcctccacaacggccttgttggtcagcttcagcgcctcgtccacggtcttgcccttgatcaggtcggtggccatgctgctggtggcaatggctgcgccgcagccaaaggtgaggaacttgacgtccacgatcacattgttctcgatcttcaggtacatccgcatgatgtcgccgcacttggggttgcccacttcacccacgccgtttgcgtcgggcagttcacctacgttgtgcggatttgcgaaatgctccatgaccttggcactatacatacttgccataattactgctctcccttcaggctgaactggcgggccttgttctgaccctgcagccacatacaactcatagcgcggcggcgggggatgacctcctccagcacgtcacacagatattttgcttcctccatggtattctgcgggccaaaggtgaaccgcatggaaccgtggccgatctcttccggcaggccgatgctcagcagcacatggctggggtccagactgtcggagttgcaggcagagccggtagaggcgcagatgccgtgcatatccagatccagcaggatggtctcgccctccagacccgggaagctgatgttcacattgttgggcagacgggggctgcggccgccgttcaggcgggcttccgggatgttcttgaggatgcggtcgatgacgtaatcgcgcagctcgctctcgtgggccatgcgctcttccagatgcgtggtagccatttccagcgccttgcccatgccggcgataccggccacgttctcggtgcctgcacggtggcgggcctcctgactgccgccgtcgatcaggttctggggccatacgcccttgcggcagtacagtgcacccatgcccttggggccgttgaacttgtgggcgctcatggacagcatatccacgcccagctccttcacgtccacagggatggcgcccacagcctgcaccgcgtcggtgtgcatccacacgccatgcttgtgggcgatctcggcgatctccttgatgggctggatggtgccgatctcgttgttggccatcatgatgctgaccagtgcggtgtcgggacggatggcagcctccacgtcctcggggcggatgtagccctcggaggtggggcggatataggtcacctcaaagcccatgcgctccagtgcagccatgctgtgcatgatggcgtggtgctcgaaagcgctggtgatgaggtgttttttgttctgacgtgccttggtaaaggcggtgccctttacggcccagttgtcggcctcggagccgcagctggtaaagaagagctcagccggacttgcattgatggcctttgccacctgcgcacggccggtgtccacgaattccttggcctcgtagcccacactgtaatggctgctggggttgccgcaggcaccgctgagcgcctgcaccattacctccagcacctccggtgcacaggctgtggtggcagcattatctacataaaccactttttctgtgttttccataagaatgaccctttctcattgaatgcgtgtgccacagggcggcacccccgcacgcacacgcggaatcctttcaacggataagttataccatatcattccctagtatgtcaataggaatactggaattcccggttcaaaagcaattttttgcgcccgcaaagccggaaagaaccattatttgccttttccggtcagcttgcccagcgctaccttccacttggggtagccccagcgcttatcctcggcaaagtcgtctgccagcttccacggaaagatgccgccgtcaaagtacagatttccggcttcgtccacccggtccagttttttgggcagatagctctcgtcgtaatagctcttgcggcggtccggcagtacccagtgcagggtaccgtcctcgtccatgccggacgcccacacgccgaacacaaaggtggcagcttcaccgtagcagtgctgctcaaagcggatagcgccatcgtagtagaacttgatgacctccagcgtaccggattcctttttgccgtcccgacctaaagtagggcggtaatcctgctggtaacggcagccgcagtggctgcccgcgaactcttttgcatggaacgacatggcatggtttcctttccggtatgatttttgcttctttaataaagtatataaccttaaaaatgcccctcaaaatcgccctcgatctcgtagggccagcttaaaatgccgccgaggtcccgcaggtcggtgtagccaagggcttccagcttctgcacggcatcggcgctgcggcgtccggtgcggcagtacaccagccacagggcgtttttgtccggcagcacctcggcggcgcggtcggtgacctgtcccagcggcagcagctttgccccggggatgtgccccacggcgtattcgtccggctcgcgcacatccacggcgacagccttgccggaatccagcagacggatggcgtctgcggcggtgatcttctctgtcatactctcactcctcaaagataggttctgttccatcctatgataacagaccttttttgtttgcacaagaggtttctcctttgcaaaatccgagtaacgtgctatactatgaaatacagcaaggagaggacgaccatgaaattttccaccaagagccgctacgccctgcgcctgatggcggagctggcgcgctatgcgccgggcaccaccgtcagcctgaaggagatcagcgaacggcagaacctgagcctgaaatatctggagcagatcgtcaccccgctggcgcgggtggggctggtcaagagcgagcggggcagtcagggcggctaccgcctgacaaaagaccctgccgactacaccgccggcgagatcctgcgcgccatcgagggcagcgtagcgcccattccgtgccttggcagcgtgaccaacgagtgccccatgtccgagcagtgcttcaccctgccgttctgggcggggctggacgaggtgatcaaccagtatatcgacagcgtcacactggaacagctggcaagccagctgcccgcaccggattccgccgcgcaggagagctgctgcagctgcggcggcacaaaaaatgagaaataagtaaaaataaggcttgacattcccctttgcatcggctataataatcaagcattcagcgaatgcatataggggtatagctcagctggtagagcagcggtctccaaaaccgcgtgccgtgagttcgaaacttactacccctgccatgacgcacaggttcttcggaacttgtgcgttttgtttttagtaaaactcccccagtctcgctgcgctcgacagccccctctaagatggggcctttggcgcgcccggaaactttacactttagccggaaactgtatcgccgccgccaaaagccgttcccttggggaaggtggctgcgaccaaagggagcagacggaaggggtctttacccccttctgcaaaaaattgcattttctgcaaatttgtgcttgacaacaggccgacttttcgatataatagagcacgttcccgcggtaagacgccgcacgaacttgagcgatcatggcccggtagctcagttggttagagcaccagcctgtcacgctgggggtcgtcggttcgagcccgatccgggtcgccatttgctgctatagctcagttggtagagcgcatccttggtaaggatgaggtctccagttcgaatctggatagcagctccaaaggcaaacacctcgaagtctcaggacttcggggtgttttttgtttatcctttcagccgcaccgcaaaaataccgccgcacagctgtgcggcggtatttttcattcttccccatcggggatattttctgcgtccagcagatactcggtctcggtctgctgctccatctgctgcactgtccagtccagctgcacagcgccgctcagatccagcgaatagtcctcggtatacagcagactgccggtgttcaggctgctttctgccgggctgcgggcatcccatgcaaagtgcagcttttccggcggcacggtgcactgctttgccagtgcggtcaggatgtagcagtcccgggcaaagtcggcggcgctgtcgtaagggccgaacaactccacggtcagggtcaggcaggtatccccggcgggcagggcggcggcctgctgcaaagtctcggcctttgcaccgttcagatacagccagccgctgatgttctggatggcgacgtcctgcgcgtcctgcttgcaggcggagtacagttcatcaatggcctgtgtgctcaggcggttcatggtctgctgattttcaccgctcaactcgtcccatagcatgggcagcatcgccatgcagaagcagcccgccatcagcaccagacagaccagcacggacacaaaatcgtacttccagcggccggggcgggcggcaaagaagagcacctcgcatcccagcagaaccagcgccaccgccggggcaattttcagggtcagctgcacatcaaagcccggcacgaagaaatacagcaggaagaacacgcccgccgcaatgagacacgcgcccaaggtcaggctgcccacccggcgcaggggcttttcagcgggtcgtttttctgccggtttctgctccggcgggggcacactgcccggctgtgccgtcaagggggtcttattctgctcggtcatcgtcatcctccgcaggggtctcgtcctgctctgcgtcggtcaccggctcccccagcagtgccgaaagctccggcatggcaaaatgggtgtccgtgtctgcggtgtcctctgcatcctctgcatcctctgcctgcggcgcagccgtgtaggcgtggaaatcctcggcttcctcagtctcctcttcagggggctgcttgccctttttgtttttcgggccgcgcaccagccacataccgcacacgatcaatgccacgcagaccacgatctgcggcagagcgtccagcatcaggtagatggcgcggaaaactgggttatcctgtccccagcgccacatcacatcgcccagcacccgcatgatgatgttgttgtagaacacgatcgcgcccagtgcgatgagcccccagcccaccagcttgtggctctcgcccatgaactgggtcatgcgggcatcgtgccagttaaagtgcaccagataatcgtcctccggggctttttccgccgccagctgcgcgcggaggtttaaggtatcgaaaaagctgtacatatacacaacgatgcagccgactaccagtgcgtccagccccgtggtgctgcctaggataatgaacaggcagaacatggtgatgagcgagagcccccgcttcatatagccctgatacatctgccccgcaccggggatgcaggcaaacagcagggtcaggatcccgtttttcttcataatcagttccctcatttctcagtggtgtctgcactgtggtgcaaaagcgcatccagtgcatcggatagtttctcggtcagctgttttttgtcctctatgggcttgcccagcggggcggtggatggctgcggggctttgtcgttcaccggcttgcccagcagctccggttcggtctgctgcgtggtctgcggcagccatgtgttcagctgctgcccggtgtgcaagatctgttccagcgtaccggtgcgccacatggtcagcgccagcacagcggctaccgttgccacggcggcgcgtccccatgtgttctgcatcagccgtatccatatcgttcccatcaccgcgccccgggcggagcgcggcggctgttccagcacatcgtcggtcagcagagcggtgtagcggtccatgcagcggtcacagtaggcaaggtgctcggcggcttccatccgctgcgtttcgtccaattgcccgccgaccagtgcctgtaagccttcctcgctcagacagccttttgcgtcaaacagttccatgtacgctcctcctttcacagggtacgcggtcgttttgcaaaatctgctgcgccagcatctttttggcgcggtagacctgcgcttccaccgttttgggcggtcggccgcacagtcttgccgcttcggccatggtgtgctgctccagcagcaccagacggcagggcgtgcagtaaggctcgcgcagatttaagatcatctccgtaagctcctcctcgcccagcgcttccagcacctgctgctccggctgcataccgggcggcgcgccctccagcgccagcacctcgtcgccgggggtgttcatcttacgcacccacgcgctgcgcagataatccttggctttgttggcggcgatgcgcgccagccactgcttttcaaagccgggcgggcagcggtcgatggcccgccacgccgccagaaaggtctcctgcgtcaggtcctgcgcctcctgtacatccggcaccagctggtggcagaccgtgtacacgagcgcctgatatttctgcaccatcgtgctgaattcctgtgttgtcaacgcgctgcacggcctcctttccggttctggatgcggtgctctgcgccgcccttctgtctttaatacgaaggagcggcggcagttcctgcaaaaaactgaaatattttcaaactttttcttcttccacggatatggtacaatagcagtatagcacacagggaggatttacgccatggcttctaccacccgtcaggcgcttttacaggcgctcagcgccgccgagggcgcgtatatttccggccagcagctggcgcagcagctaggggtcagccgcgctgccgtgcacaaggcggcagcggcgcttaccgcgcagggctatgcgctggaagccgcctcccgccgggggtaccgcctgctgggcggcgaccccttctgcaccgaggcggtaggcccctaccccgccccggtgcagctgtacgacacgttggaaagcaccaaccgcaccgcaaagctgctggctctggaaggtgctgcccacggcacgctggtgctggcgggcgggcagaccgccgggcgcgggcggctggggcgcagctttgccagcccggcgggcaagggggtgtactgttcggtagtgctgcgcccgccgctgcctgccgccaacgcccagaccgccaccatcggcgcggcagtggcggtgtgccgggcggtgcggacgctgtgcgggctggaccttgccatcaagtgggtgaacgacctatattacaagggcaaaaaggtgtgcggcatcctgaccgaagccggtactgaccttgaaagcggccagctggaatggctggtggtgggcattgggctgaatctgaccgccacggctgaggactttcccccggagctgaccgccaaagcaggcagcttataccccggcggccctgccccggtaagccgggcggcgctggcgggtgccatcgggcgggagctgttagcgctgtgcccgggttttgaatgtctggacgagtaccgcgcccgctgctttgtgcccggccactgggtgaccgtgtgcaccggcaccgagacctacgccgcacaggcgctttccattgacgatgccgggcggctggtggtgcagcgggagggcggccgcatcgaagcgctgcgctgcggcgaagtgactatccgtcctaccaaaacagattgaccggcagcaccgtcatcccccgatgcggtacatatcccgggtcaccgggatatcaaggcagtcccacgggtggaagggatgctgcaggggcttgctgcggacagccgcccggatggcttccagcagctgcacatccgatgcgccgccgcgcagcatttctcccagctctacgccttcctcgctggccagacagggccgcaggaagccggaggccgacagccgcacccggttgcagcgggtgcagaaaggctctttgccgtgcaccgggctgataaagcccacactgcccgcccagccggggtttgtgtaatataccgccggtccgtccccaaaagcggcgctctgcgccgggggcaggctgtacagccggggataatcctgccgcagctgctgcaggatctcgctgttggggatgcccagttcctgcagttcccgggcgcagcccacgggcatcagctccagaaaccgcagccggacggggaaaaaccggacataccgccggacgagccagcggtagtcctgctcattatagccccgcagcgccatatagttgagcttgagcgggatgccgcagaacatggcatcctcaaaagcctgcttcacggcggcgtgctgctgcggcgtaaggcgggagatgcgcttgttccgtgtatagctcaggctgttcaggctcagattgatgccgtccagcccggcttccttcagcgccggcagctgcgccgacagcagggtgccgttggtggtcagggtcaccttgcggatgccgggcacagccttgagccgggcggtcagctgcggtacgccggcgcgcagcaaaggctcgccgccggtcagccgcagggtatcgatgccgcaggcggcaaacagctgcaccagatgcagcagctctgcatcggtaagctcctgcggcggcagcgcggcaggctcctgcgggcggcagtagcagcagcgcaggttgcagctctcggtcagcgagagccgcaggcaatggatatcacggtttgcctgatcatacatagctttggtctccttgcgccccgtctgcggggctgttttatgcctgccggatgccggatgaaaaaagcccctgtccgccttgcagacaggggcttttcaatcaaccctcggtaaagtattccgggtggacgctgcgggcctgctccaccgaaagcttatagcggttcaggtggctttccagcgcttcgccaagctcttcggcggtgccgtgcagcaccatttccagaatgcgggtgtgcgcatcgcagacggacttgttctcgttggtctgcaggctgaacttgcggatgcgctccacgtgctgcagctcgccgagcatatggtcaaaatgtgcttccatgccggtgatctcaaacgccttgcggtggaactggttgtccagctccagcaggcgggtctcccggttcggctgggtctggtcggcctccagcaggcggtagttctcaatgatctgccggtactcctgctcctgctggtcggtcagatggccgcgcacccggttcaggatctctttttcaagggtaaaacgggcaaactgctccagctccatccgcttcaggtcgataggggccacatgggtgccgctctggggcttgatgtccaccatgtgggcaatgttgagcatgatcagcgcttcccgcatgggggtgcggctgatgcccatctgctccgcaagctccctgtcgttcagggggtcgccgggcttcagctccatggtgatgatccggcttcggatggtctgatacgcctgttccctcgcactcaaagatgccattgcagtgttctcccttcggggtcagttggtgatatattagtatatgaccatattacccaactgccgggcaactgtcaatagcaggagcaaccgaaaatcaagggcaattttttgctattttgttcaatgaagtgcccgcacccggcggtacgccaccggcagccacacaaaagccactgccaagccgcaggccacgtcaatgaccgagtgctgcttggtgaacacggtagacaggcagatcagcgccgcccaaacccatgccagcgccttgcgcaggggcttgccctctgccagcttactgtggctgaaggccattgccatgcaggcagaactctggcagtggatggagggacagacgttcacggcggcgtccgctttccacagcagctgcatgatccgcagcgccgggttatccctgccaagggtctccacagcggggcgcagctccagcccgttgggcaggatcatgtacacgatcaggcagaaggtcatgccggaaaacatggtcaggcaaagcttatcgtagctggcggtatcgcaccaccacagtgccgccgtcacccccgccagcagcaaaaaccagctgcaataggggatcacgaaccactcgttgaaggggatcagatcgtccagcggactgtgcaggatatatttcggggcggtaacggtgagatccagccagaagaaccagatcaggtacaccacccagtacagctggtaccacaggtgcgggcggcaccggctgcgcagttggctaagcttcatgtcgtttctcctattttttatgtgaattgacgtgctattatagcacattccgtccacttgcgcaattgccgcccctgcgatacaataaaaataagctggatcttattataaaaggagtaccctatgccacaacaatttcccgccatccgtctggtcgcactggatctggacggcactctgctgaaccgcgaggggcacgtcactccccgcacccgcgccgcattgcaggccgccgtggacaagggcgtgtacatcgtgcccgccaccggccgtccgctggccagcctgccgccggaggtggcgcagctgcccggcatccgctacgtcatcacctgcaacggtgccgccgtgtgggacttgggcgcagaccccgtgggcgcagtgtacagccgctattccaacgcgaaagagcaccgcaccagcaccccggtctgcctgctgcacagcctgatgccggtggagactgcccgcgaagcctttgccgtctgcgagagcttccacgccgacctgcgcattttctcggacggatacgcctgcaccgatgcccgcagcattgcgctggccgctgcccgggcggcgcagaaggacagcaccgaagcgcgccagcccaatgacggacgctttaccatcctgcgggacgcagccgagtggatgagccgcaacgcctttgccattgaaaagctctgcgtgttctttgaggacccgcagcaggctgcggctgcgctgccccgcttttacgccgtcccgggcgtggaggtcgtgcaggggtcgccgaaaaatgtggaggtgaccgccgccggtgtggacaagggcgaagcgctgcgcgcgctggcagaccggctgggcgtcccgcacgaatgtacccttgcggtgggcgacagtgagaacgaccgcgccatgctgcaaaaggcaggggtggccgctgtaatggccaacggaatgccggagatccgggcgctggcgcaccttgtcagcaaagccgactgcgaccacgacggcgtggccgagatactggaaactcttggcatctgagccagtttttgcagcaattttccagcatttttaccggcttctgccccgatttttcgggtcattcgtcatttttgtgcaatgtatacaagctattatgccaaacattgtgcttgttgagtattaccaaagacgggctgttcgtttatactagtatcataagcgcgtaggggggtattgcgcccacaggagcaagcccgacgcaccgagagagttcaaatataaaaggagaaatgcgttatgaatcccatcgtagaaaaggtctatcagatcggcattatccctgttatcgcttttaacagcgttgatgaggccctgcccctgtgcaaggctctggctgagggcggtctgcccgcagccgaggtcaccttccgcactgcctgtgctgaagagtgcatccgcaagatccacgaggagatgcccgagatgctgctgggcgccggcaccgttctgacctgcgagcaggctgaccgtgctatggctgccggtgcttccttcatcgttgctcccggcttcgaccccgaggtctgcaagcacgtcatcgacaagggcggcatcatgatgcccggcacctgctccgcaggcgagatgcagcaggccatgaacatgggctgcgaggctctgaagttcttccccgccgaggcaaacggcggcgtgggtatgctgaagaacatcggcgctgccctgaagggcgctcgctggatgtgcaccggcggcgtcaacgccaagaacgtcaacgattatctgggctacgaccagatctttgccgtgggcggcacctggatgtgcaagagcgacgtgatcaaggccggcgactgggcaaagatcaccgcacagagcaaggaagctgttgacaccatgctgggcctgaagctgctgcacgtcggcatcaacaccgataacgaggaagaggccatgaagattgccaacctcatcagcgcaatgctgaacatgaaggtcgctcccggcaactccagcatctttgtcggcaacaaggagttcgagatcatgaagaagcccggccgcggcaccaatggccacatcgccatcggctgcaacaacgtggaccgcgccatctaccacctgtctcagcgcggcgtgaagttcgatctggacagcaagaacgtgaagaacggcaagaccgttgcctgctacatggcagacgagatcgccggctttgccttccatctggtgcaggcataagcgcctgtccccttttaccgtaaaagccccgccgcaccgggtacgccctgcggcgggatgatgaaacacctgatataaaggagaataaccaatgaaagtcgttacttttggcgaactgatggtccgtctgcagcccttcaactacgagcgtttcgttcaggccaacagcctggagtttaccttcggcggcggcgaggctaacgttgctgtttctctggccaactacggtctggacgcagctttcgttaccaagctccccgcacacgccatcggtcaggccgctgtcaacagcctgcgccgctacggcgttgataccagcatgatcacccgcggcggtgaccgtgtgggcatctactacaacgagaagggcgcttctcagcgtggttccgtctgcatctacgaccgtgccaacagcgctatccagctggctcagccttccgactttgattgggataagatcttcgagggcgtggattggttccacttcaccggcatcaccccggctctgggcgagaatgttgtcgagatctgtcgcgaggcctgcaaggctgctaaggctcacggcgtgaagatcagctgcgacctgaactaccgcggcaagctgtggacccgtgagcaggcccgcgctgccatgactgatctgtgccagtacgttgacgtctgcatctccaacgaggaggacgcaaaggacgtgttcggcatcgaggccgaggctaccgatatctacggcggcaagctgaacgctgagggctacaagagcgttgccaagcagttggctgacaagttccacttcgagaaggtggctatcaccctgcgtgagagccacagcgcattcgacaacggctggagcgctatgctgtacgatgttgcttccaatgagtactgcttctccaagaagtacgatctgcacatcatcgaccgcgttggcggcggcgactccttcggcggcggcctgatctacagcctgctgaccggcaagagcactcaggaggctgtggagttcgcagttgcagcttccgctctgaagcactccatcgagggcgactacaacatgatgaccgtgtccgaggtcgagaagctggccggcggcgatggttccggccgtatccagcgctaagagcaggagggagtccgctatggatatccgttattcctgcaaccagaaggatttcaagcgctataccaccgaggaaatgcgggacgagatgctgatcaccggcctgtacaaggcggatgaggtggtggccgtttacagccatgtggaccgcatggtcacgctgggctgtatgccggtgcacgagaccgtgtccatcgacaagggcatcgacatctgggccaacttcggcacccactacttcctggagcgccgcgagatcggtatgttcaatatcggcaaggattccaccggcatcgtggtggctgacggcgtaaagtacgagctgggctataaggactgcttgtacatcacgcagggcaccaaggaagtcacctttgcttccgccgacccggagcatcccgccaagttctacatggtctctgctccggcacactgcgcttaccagacccgtctgatcaagatggctgatgcaaaccaccgcccgctgggcagcgtggacacctgcaacaagcgcaccatcaaccagttcatccacccggatgtgctgaagacctgccagctgagcatgggtatgaccgagctggcaccgggttccaactggaacacgatgcccagccacacccacgagcggcgcatggagatctatacttactttgaactgcccgaggggcaggtggtgttccatatgtgcggcgagcctacccagacccgccacatcgtgatgcacaacgaggatgctgtcatcagcccctcctggagcattcacagcggcgtaggcacctcgaactatacgtttatctgggcaatgggcggcgagaacatggagtttgacgacatggacaacatcgctaccactgacctgcgctaaaaagcaccaatcaaacgccccgtaccgggaaaccggtacggggcgttttgctaaaaaattaacttggatactgtgaaaaaaggagaacatcatggatctgtctgcatttaacctgcagggcaaagtagccctgatcaccggcggtgcccacggcatcggtttttccattgcagagggcatggccaagtgcggcgccgtcatctgcttcaactgctcctctgaggccagcttggaaaagggcatggccgcctacaaggctgccggcatcgacgcccacggctatgtggcagacgtttccgacgaggacgccgtgaacgccatggtggcaaagatcaaggctgaggtcggctctgtggatattctggtgaacaacgccggcctgatgaagcgcgtgcccatgatcgagatgagccacgccgactttatgcgggtgatcgacgtccatgtgggcggtgctttcaactgctccaaggccgtgctgcccgacatgatggaaaagcgcgagggcaagatcatcaacatctgctccatgatgagcgagctgggccgcgagaccgtctctgcctacgccgccgccaagggtgcattgaagatgctgaccaagaacatcgcctctgagtacggcgagtacaacatccagtgcaacggcatgggccccggctacattgccaccgcccagaccgcgcccctgcgcgagatccagccggacggcagccgtcacccctttgacagcttcatcgttgccaagactcccgcaggccgctggggtgacccggaggacatggttggcccctgcgtgttccttgccagccacgcatccgactttgtaaacggccagatcctctacgccgacggcggcattctggcttatattggccgccagcctaagtaaatcctgaaaaaatccccccggcgctgctcgccggggggatttttataggaaaattagactattttaaatgcgctccgcttcgctctgcgcataaatagcggaattactatttatatttcgcgtttgtcgcgctctgcggagcgctccaaacgcattttcacgggaggagtcgtaacgaaaaaccggctgccgcacgttttgtgtgcagcagccggtccgtgttttatttagaagtcattctgccaaagtggcctttttcctcttcgtcctttttagtctcgggcttttccgccggggtcagacgcacctcggtcacgcggcgcttggcggtgcgggtgaccacgccgtcgtagctgcccagcgtaaagcggtcgcccaccttgggcagacggcaggtcttttcctgcaccagaccgttcactgtgttggagtcgatatcctcgtcctccggcagacccagccgctcgtacaggtcatccacaccggcgctgcccagcacgatccagctgccgtccgactgcttgcggaagtcctcggtcacctcgtcgtgctcatcccagatctcgcctaccagctcctccagaatgtcctccagcgtgatgataccctcggtgccgccgtactcgtccaccaccacagccatgtggtggtgctgctcgcgcagggtgcgcagcagctgggagatctgggtggaaccggtggtgtagagggtaggcttgaccagatcctccagcttgacctcctttttcaggcgtgccatgtagaagtccttttcatgtaccacaccaatgatgttatcaatggtgtcgtggtacaccggcagacgggagtagccggactcggcaaaggtctgtgccacctcttccagcggcagatcgtcctccaccgcgatcacatccacacggggggtcaggatctcttccacctccacgtcatcaaactcgatggcgctgcggatcagctcgctttcccggtcggtcagctcgccgtcgttctcggcttcgctgaccatggtcatcagctcgccctcggtgatggtgtcctcctcagtgctgtggacaaagtgtcccagaaagcgcttccactggctgaacagccatgtcagcggggtaaacaccagcatcagcaggctgagcaccggtgcaactgcggtggcaaccgtttccggcatctccttggcaaggctcttgggggtcacctcgccaaagatcagcaccaccacggtcagcaccatggtggacaccgtagcgccccgctctgcacccagcatcttggtaaaaatgatggtgccgatcgaagctgcggcaatgtttacgatattgttgccgatgaggatggtggaaagcagcttatcgtatttttcagccattgccagcacccgggcagcagaggtatcgccgtcctcggcgcggcttttcaggcggatctgattcagggaagaaaatgcggtctcggatgcggagaaaaaggcagagagtgccaccaatactaccagcgctacccagagcgtcatactgccatcgtccataaaaagggaaatcacactcaactttctgttttaaatttagttttatttgcccgccgtgttcccgttgtgcttcaaccgtgccacgcgggcttttccgtatacaaaaatgtgctttccatcgttgccatttccgcgatgaaaagcacatcaatgttattttctataataacatattctgcacacaggtgcaagcgtttggcctgtactccatgtacaaaaccggtaaagtttagcgcagaaccaatgcgctgccgtcataatccaccgtcagggtgttgccctcggcataactgcccttgatgatggccttggcgatcagggtctctacgcggctctggatgaagcgcttgatgggacgtgcaccataaacgctgtcgtaggcagaatcaatgatgaagtccttggcggcggtggtcacctccagcttgaggtgcttgccctcctccatgcgattgcgcagatcctgcagctgcagatccacgatcttgcgcatttcgtccttggtcaggctcttgtagtagacgatctcgtccagacggttcaggaattcggggcggaacttgctcttgagcagcaggtcgatctggtgctttgcgtcctcgctcagctcgttggagccctgcgcacggcgctgctccagatcgttcaggatgatatcgctgccaaggttagaggtcaggatgatgaccgtgttcttgaagtccacggtgcgtccctgactgtccgtgatgcggccatcgtccagcacctgcagcaggatgttgaacacatcggggtgggctttttccacctcatcgaacagcaccacgctgtaaggcttgcggcgcacagcctcggtcagctgaccgccctcttcataaccgacatatcccggaggcgcgccgatcaggcggctgacgctgaacttctccatatattcggtcatgtcgatacgcaccatgttgcgctcgtcgtcaaacagtgcctgtgccagcgccttggccagctcggtcttgcccacgccggtggggccgaggaacaggaagctgccgatggggcggttggggttggcgataccggcgcggctgcgtaggatagcttcgctcaccttggtcacggcctcgtcctgcccgatgacccgctggtgcagcacatcatccagatgcagcagcttctcgcgttcgccctccaccagcttttctaccgggatgccggtccagcgtgccacgatgcgggcgatctcctcgtcggtcacgcggtcacgcagcaggctgtcctccttcttggcggcagccaccttttcctcttcggccagctgcttttgcagctggggcagcttgccgtacttcagctcagcggccttgttcaggtcgtactcgcgctgggctttctcgatggcggcattggtctgctcgatctgctcacgcagggtctgcaccttgccaatggcattcttttcgttctcccactttgccttcatgctgcggaacttatcctgcaactcggcaagctccttttccagatccttcaaacggctctggctcagagcatcggtctcctttttcaggctcacctgctcgatctgcagctgggtgatgcggtgtgccagatcgtccatctcgctgggcatactgtccatctcggtcttgatcatggcgcaggcttcatccacaaggtcgatggccttatccggcagaaagcggtcggtgatatagcggtcggaaagggtggcagcggcaatcagggcgttgtcgttgatctttacgccgtggaacacctcataccgctccttcaagccgcgcagaatggagatggtatcctccacggtaggctcatccacctgcaccggctggaaccggcgctccagtgcggggtctttttcaatatactggcggtactcgtccagcgtggtcgcgccgatgcagtgcagctcgccccgggccagcatgggcttgagcaggttgcctgcgtccatggcaccgtcggtcttaccggcgcccacgatggtgtgcagctcatcaatgaagaggatgatcttgccctcgctcttcttcacctcgttcagcacgctcttcaagcgctcctcgaactcgccgcggtactttgcaccggccaccagagcgcccatgtccagactgaacacggtgcggtctttcaggttttcgggcacatcgccgcgcacgatacgctgcgccagaccctcggcgatggcggttttaccaacgccaggctcgccgatcaggcaggggttgtttttggtcttacgggacaggatacggatcacattgcggatctcctgatcgcgtccgatcacggggtccagcttctgcttgcgggcaagctccaccagatcctgaccgtacttctgcaaggcgttgtaggtgtcctccgggttatcggtggtcacccgctggttgccgcgcacggcggtaagctgctgtaaaaaggcgtcctttttcaggttaaaggcgcggaacagctcactggtggtctggtcctgctcgtccagcagaccaaggaacaggtgctccacactgatgaagtcgtccttcatggccttggcttcgcgggcggcggcgctgagcaccttatcggttgcctgcgagatatagaccttatcggggtcacggccggagccggacacccggggcagcgcggacagcttttccgccacggcggcggcaaagctgccggggtcaacgttcagcttttgcagcagctgagggatcaggccgttttcctgcgcagccagtgcgtgcagcaggtgggcgggctccagcgcgttgtgctggtactccacagccagctgctgggctgcctgcaaagcctcaagggtcttttgggtatattgattggtattcataaagtcaagcctccattcataccggaaggtttattttagcggacggataagttctttgctaacagctccgtgcccggcagtggcagagccgtgattcaattgtactgatgttcttcttcatggtcttgcgcacctcctgcggggcagttcgttttgtttttagcactctatctgctcgactgctaaaaatatactcctgtccacctgctttgtcaatagggttcacaaaaagtttgcagaatagacgcaaacccatgcttttctgcccagcgggataaaacaaaaaagcaccggcagccttcgccgctgaatttcagaaactcagcgaattggttgccgatgctttatttttagcgtcctcgccctctcagtcatcgctgcgcgatgccagattcccccttttgtcgctgcgcgacatcttcccccggccgggggaagtcggccctcaaagtgggagcccttggcagtccacgcaaacttcatctctttgccaaggcctctccctttgggagaggtggatgcgaacaaagtgagcagacggagagggcgagcccgctgcccttttccgtcttatttcagcgcttcttccagcaccttcagcaggtgcgggatatccagcggctttgcgatgtggccgttcatgcccgcattcaaggcgttctgcttatcctcctcaaaagcgttggcggtcatggcaaaaatggggatgcccgccttgcgggggtcgagcagggcgcgaatgcgccgggtggcttcgtagccgtccatgcggggcatctggatgtccatcaggatcaggtcgtactgcccgggcgcggactgctccatcttttccactgcttcaacgccgtcctcggcggtgtccacaaggaagcccgcttcctttaagatctctatggcgatctcccggttcagggcgttatcctccaccagcagcaggtgcttgccgtcaaagcttgccttgggctgcggggcgggcgtctgctccggctgcacccggaagggttctgccagcaccttgcgcagctccgagaggaacagcggcttttcgcagaaggcggtcacaccggcggcgcgcgcttcttcctcgatatccgcccagtcgtaggcggtcaggatgatgatggggcagctgtccccgatgaccttgcggatctgccgcacgatctcgatgccgttcatatccgggatgagccagtcgatgatatacacgctgaaagcatcgccctgctccacggcgtacttggtgcggatgaccgcttccttgccggagatggtccactccgggcgcatcccgatcttggaaagcatggtgctgacgctcaggcaggtgttggtgtcgtcatctgccaccagcgcccgcagcccttccagctggggcagctgcttgatctccgccttctgcccgctgagcgggaagcagaggttcacgatgaactcgctgcccttgcccggctcgctttcaagggtgatggtgccgcccatcaggtctacgatattcttggtgatggaaaggcccagacccgtgccctgaatgccgctgacagtagaattctcctcccgggtgaactcctcaaagatatgcttctggaactccttattgatgccgatgccgttgtctttaatgcggaactcgtagttgccgcagcccttgggcgcaccgggcttctgggcgatgcggatgctcaccatgccgccggtgggggtgaacttgatggcattggaaaggatgttcagcagtacctgattcagccgcagcgggtcggtgatgatgtcctcgtccaccacgtccatggtgtcgatgaacagcgacaggcgcttggagctgatgttgggctggatgatggagcgcacatcgtgcacaaggtccggcagatgcaccgccttttcctcgatctttaccttgccgctctcaatgcggctcatatccagcacatcgttgatgagggagagcaggtgctggctggaaatagagatctttttcaggtaatccagcacctgttccttattatcaatatgggtcgccgccagcgaggtgaagccgatgatggcgttcatcggggtgcggatgtcgtggctcatgttgaacaagaactcccgcttggcgcggtttgccgctgcctcgtgccggacagccttttccagcttgcggttctgctcctccagctgagcgtggtatttctgctcctgctcccgcttttgctgctccgcagcctttatggagcgatggcgcagcgtttgcagcactgccacgcagatcagatagaagatcagcgccgtcagcagtgcgctgctggcattgcggaacaccaatttttcgccgatatagatatacaggtcaaaattctgtccgttgctgtacatcccgaaataacagccggaatttgcccagtcgtgggtatgggtcaaggtatcgggcgcaccggccttgcggatgccctgcaccagcgggctgttcgtggtgtacagtccgatgaggctcgggtcgtttgcggcgatcaccttgttatcctgcacgataaagatggtgccgctgatgttctgcgggtagccgtccagcacgctctggatggacagggctgtgccctccacaaactccggcggggtcacccggtaagccagcagtatggcatcccctgctgcggcgcggtgggtggcaacatccaccgccgtgccatcctgtaacagaatgcgcttgagataggtcttttgcgggttttgcagcacgttcagcgcggctttctcccgcagcgactccgcaaactgcgcatagtcaacattaccacttgtatattcacacagtgcttttccgttttcgtccagcacggcaatgccggtaagccagagggactccgtttctgcccggaggctttcggggtcgtagaggtctaaggcatcattttcagccagctgccgcaccgccaccgccatccggcgcagcgcctttgcggtgatggtgtcgttatgtttttcgaagctggtggactgcacctttacaaagctgatggtgcgggcaaagtaatcctcggtagcacgtatggactcctgcccggagaagagggtcactgtcagcaaaagcagcacgcccatcagcagatagagcgccgccatccgcatattgggagtgaacgttttctttttacggttcaagggcgtccacctccagatatttttccgggtccggcagatacttgcctacgatctgtttcatcgtgccgtcggcgcgcatggcggcaaaggtcttggtcagctgttcgtccagcccgcgggtgtcgttcagcgcaaaagccacgccgatgccggtgaccagcagcggctcttccagaatgcggaaatcggcattgcaatcctgcatatactgcaaaatggcagtctcgtgggcggcaacggcgtccacatagccgcagttcagcatagcgtactgcacgctgcggtcctcggtgctcagcacttcgcccagctgcgggatgcgggggtcggtaccggcaaggaaaatttcctccggcttggtggtgctttgcaccatcatggtcttgcccgcaaggtcggcaagcgtttcaatgccgctgtccgcattgaccgccaccacctgacggctagtcatatacggccctgcccagcggtacagctgctcccgcccgtccatggaaaagcagccccagatgcagtcgatggcaccgctttccaccagctttgttttctgctcccagtcaatgatctcgatctgcaccgcataccccatgcgggcaaaggcttcggtggcaatgtccacatcaatgccggtgggggtgctgtcattgctcaggtagacaaaaggcgggtaggaatcgctgcccaccgtaagttcgggcagtgctgccgccgcctgcgttttgccgcaggcggtcagcccggctgccgctgccgccgcgcacacttttaaaaaggtgcggcggggtattttatggttggatctctgttttgtcacgcgtaattttcctcacattaccattgtaaaatatcctgcttcagttccccctgcacatccagcaggcactggatcagcagcgggttgaacgccccgcacgcgccgtttgtgatcatctggacagcagtctcgtgcgggaacgcctttttgtagcaccgctcgctggtcagcgcatcgtacacatccgccatggagaccagctgcgcactgatggggatatcgtcccctttcagcccgtccgggtagcccttgccgtcccagcgctcgtggtgccagcgggcgatctcgtaggcagtctgcaaaagcggctggtctgcaaagctttcggtcttttgcagcatctctgcgcccagcatactgtgggtcttgatcaccgcaaattcctctgcggtcagcttgccgggcttgtttagaatggcttcgtcaatgcctattttgccaatatcgtgcagcgccgacgcaagcgggatatcatcctgctgctccggggtcaggtcgtagcggctggtcagctccatcagccggtgcagcagcgtctcggtgatgacgcggatgtgccgcacatgagagccggactcgccgttgcggaactccacgatctggctcagcacgcctaccagcacatcggtgttcttttcgcgggcgcggatctggtcggacaccatctgcaccagccgccgctgcttggcatacagcttgatggtgttgaccacccggcggtagacgatcttggcgtcaaaggggcggctgacgtaatcgcttgcgcccagctcatacgccttgcggatggcttcttccgagtcgtcgctggagatcatgatcaccggcacatcctcgatggtgtggttggtgttcatggtgcgcagcacctcaaagccgtccatgaccggcatattgatatccagcagcaccagcgagatctgccccgccttttcccgcagcagctccagacactgtttgccgttccctgcttccaaaatgcggtagtccccgcccagaatgccggcaagcatcatgcggttcatcatggcatcgtccaccagcaggatgacgggcttttcctccaagacttgctcctgagccgccaaccggctgtcctgtgtgtccaccgctaccgcgtccttgtggttcttggcctgatacatcaaaaggtctgcccggcgcaccacattctccatggggtcggcaagagtctgcatcgcgccgccgatgctcagcgaaagccggaagtgagggtagcccggcaccacagccttttgcacggcatcgcggatctgctccagctttgtcctgaggtaatctgccgggatgccggacagcaccagcaaaaattcatcgccgccgtagcggatcagcaaatccgtctcccggatacagctgcggatggcctttgcaacggtttccagtgccagatctccggcgtggtggccgtaggtatcgttgcagatcttgaaatcgtcgatatccatcagggcgatgcccgccgggccgaggttattgcgcaccacatcctcgtaatagcggcggttgtaggtgccggtcaaagcgtcatggttcagccgctgccggtagcgctcttctttttccatattccgagcggtggtctgggcaaactgagtcttttgctcctccatctgctgcatcatccgcagcaggttgcggttggcgctttccagcgcttctttctgggcgcggttctgctgttccagcttttcccgcagctccatatagggggtgatatccgtgatagtgcccacgatatagccatcgccgtgccattccacccggttggcagcactggagacccagcggtagccgtttttgcccaacatccggaagatgctgtcgccctcctgtgcgtaagtcgcgctgttttctgcgttccggtagcgcagcccggccgccagatcatccgggtgtaccagcgctgtatagcggttatcgaaccttgccgcaaattctgcccgctcccagcccagtatctccagaaaacggtcgctgatataagcaaacggatagtcgttttccgggtcctctgcgcagcagtgaaaaccacccggtatattctgtgcatagcgttccagccgcagaagtcctttttttatcgtctcgtctatttccatctggttttccctgtctctttctctgtgtaccgcaccttgacagcacgtggtacaccctgttgccgcaatttacaaatttaccttcctatgatgccccgattttgggcgtactgcaacagtgtaattttatcatcaaaaccgcctagatgcaagcattttttgccaattttgccaatggagtggcaagtaaaatgtatcagaaaaagttacaagggcagcgggctcgcccgggagacaccccttccgtgaaaatagaataccggagcgtccgcagacgctccggtattccgaaattaaaaataatatttccttagcttatgcgcagagcaacgcggagcgcattcccaatcgtcccgcgcagcaaaaaagccgccgcacaaaaagtgcagcggctttgcggggtgtcacctcacagccagcgctcagagatgatccaccacataccgggcagattgatccgacccagcagatgctccaatacgatcagcatggtattctcctttcagaccgtccgtttcagccgaacagcccctttagcaaaaacagaagcagcttagtcaagctgccgccgcccaaaaggttgagcagcggcccaaggccttgaaacatggaaggtttgctcctttcgtttctttccgtcccggctgctgccgggtgccggtctgccttatatacgaaccagcccgccgcaggattgcaaataccacggtggtaaatattgggaagaatcaattcaaatcgtttctattgcacaaggtcagcatcctcgccctctcagtcatcgctgcgcgatgccagctcccccaaagtgggagcccttggcagtccacgcaaacttcatctctttgccaaggcctctccctttgggagaggtgtcaccgtaggtgacggagagggcgagcccgctgaaattattcgcagctgccgtatgcctttacgaccccttcccgtgaaaaagttgctcagaaacgcccgcaggcgtttctgagcaacaaatccaaaatactatttccgctgaaaatgcccaaagcagcgcggagggcattctcaatcgtcttgtttagaacgcttccatgccggggtagacggcgctttcgcccagctgctcctcgatgcgcagcagctgattgtactttgccacacgctcggtgcggctgggtgcaccggtcttgatctggcaggtgttcagcgccacagccagatccgcaatggtggtgtcctcggtctcgccggagcggtgggagctgatggcattgtaaccggccttgtgtgccattttgatggcttccaaggtctcggagacagagccgatctggttcagcttgatcaggatggcgttgcccgcacccagctggatgccctttgccagacgctcggtgttggtcacgaacagatcatcgcccaccagctgcaccttgccgcccagctcgcgggtcatctgctgccagccttcccagtcctcttcgtccagaccgtcctcgatggagataatggggtacttttccacaaggctcttccagtgcgcgatcagctcggcagaggtgaactcggtgcccgccttgggcagcttgtagaagcccttgcccttggggctcttccactcggaagcggcggcatccattgccagcataaagtccttgcccggcagatagcccgccttttcgatggctgccagaatggtctcgatggtctcctcatcgctggaaaggttgggtgcaaagccgccctcgtcgcccacagaggtagccagacccttggacttcaggatggcagccagcgcatggaacgcctcggcgcaccagcgcagcgcttccttaaaggaaggtgcgcccaccggcatgatcatgaactcctgtgtatccacggtgttggcggcgtgtgcgccgccgttcaggatgttcatcataggcacgggcaggcggttgccgtttacgccgcccagaaaacggtacagcggcatttccagcgaagcggcagctgcgcggcaggctgcaatggacaccgccagaatggcgtttgcgcccagattggacttatccttggtgccgtctgccttgatcatggcggcgtcgatggcgtagatgtcggaagcatccatgcccacaaccgcgtccgcaatgaccgtattgatgttctccactgccttggtcacgcccttgcccaagtagcggctcttgtcgccgtcccgcagctccagtgcctcaaactcgccggtggatgcaccggaaggggcgcagccgcgcgccaccgtgccgtccgccagcgtgatctcggcttccacggtggggttgccgcgggagtccagaatctcgcggcctacaacagattcaatttccagataattcatcttgaaaccctcctgaatatcattttctctccctaaccgcccgggcgggcagatggggaactgtccctttagatagttatatataactaaccatcaatatcctaccacgctttgcgccccggcgcaagagccggtgcggatgtttgcagacctaaatttttaacaggggcgcaaaccgccgtggaaaacccgtttacagtctgcccccttgcggcagcggggatacgttcgcagaaatcaacttttgagatttgacccagtgaaaaagccttcaccccttggggggaaggtggctgcgaacgcagtgagcagacggatgaggggtaatttctcgcaagctgctgcttacccgcgccctcatcagtcacctgcggtgacagcttcccccgaccgggggaagcctttattcggaaaattgatttctgtggcgcggatacactatgcctaccatgtaaatttcgtatggcagatataccaaaaattctctttactttttggcagttcggttctatactggttgcggcgtttacgctgttttcccatttatagtcgttatagaggaggatttttgcaatgaataaggatctgacggtgggcaagccgtcacaggtattgtggcaattctgtctgcccatgttcggcagcatcattttccagcagctgtacaacatcgcggatagtctggtggcgggcaagttcatcggtgaaaatgcgctggctgcggtgggcaacagctacgagatcaccctgatcttcatcgcctttgcctttggctgcaacatcggctgctcggtcatcgtgtcccgctactttggcgcaaaggaataccgcgagatgaagacctcggtctacacctccctcatcggctctgcggtgctgtgcgcggtgctgatgggcattggtctgctgggctgcgacgccctgctggaactcatcaataccccggaggagatccttgcggactccgcgctgtatctggatatctacgttctgggcttgcccttcatgttcttctacaacattgccaccggcatcttctctgcccttggcgacagcaagacccccttctacttccttgccgtctcttctttgtccaacatcggcgtggacatcctgttcgtagccggtttcaagatgggcatcgccggtgtggcatgggctaccttcctgtgtcagggtgtcagctgtgtgctggccatggtggtggtgttccgccgcatccgcgccttccacaccgagggtcatgtgcagctgttctcgtggaatatgctgggcaaggtggccgtggtggctgtgcccagcattctgcagcagagctttgtctcggtgggcaacatcatcctgcagagcatcatcaacacctttggtgccagcgtcattgcaggctactctgccgccgtcaagctgaataacatggtcatcacctcctttaccaccctgggcaacggcatctccaactacacctcccagaacatgggcgccggcaagatggaccgcgtcaaggagggctttggcgcaggccgcaatctggtgtggctgctgtgcgtgccgctggtggtgctgtacttcttctttggccgcttcctgctgctgctgttcatgaacgacccgcagggccccgccattgacaccggtatgctgtttttgcgtatcctctctcccttctactttgtggtgtcggtcaagctggtggcagacggcatcctgcgcggctgcggcctgatggtgcggttcatgatcgccaccttcaccgacctgattttgcgcgtgggcattgccgccgtgctcagcgccaccgcactgggctccaccggcatctggatggcatggcctgtgggctggtgcatcggcacggcactttccatggtgttctacgtcaccgccatccgcaaggcactggcagagccgttggctgttgccgaggctgagggacaagccgcagagatccgcgccgaggccgaatttgccgccgacgccgagatggagaccctgtaacctttttgcaacttgtgaatccgtttcatctcacagataaacaaaatgaacaatttgaaatagtgcacaaaatcgcgctttaatttttgtataaagtatcaacaaagccgagaaaatgcgcccaaaagtatggacggtttgtgaattgcggatttgaacccagatagctataataacagacaagaacaggagcaaggccactttagaggggaagggccttgcttccgtttttatcaatttactttataaaacactccgaaggaggagatttttatgaaaaagatgatcactcgtcgtcagttcatggccgctgccggtgttgttgccgcagcaagtgctctgactgcctgcggcggttcttccgcaagcactgccgctccttctgctgccggttctaccgccggttccgctgctgcttccggcagcaccatcaaggtgggtgtgatgggtcccttgaccggtgacgcttccgtttacggtcaggctgttgtaaacggtgccagcctgtacatgaagcaggtcaatgccgatggcggtgtcaacggcaagcagctggagatcatcaccatggacgagcagggcgatgctacgcaggctgttacctgctttaccaagatggtggatcagggcatcaccgctttggtgggcgatgttaccaccaccccgacgctggctgtcgccgctgagagcgccgattacaatatgcccatggtcaccgcttccgctactgccgaggctgttacctacgatgccgagaccgacaccgtgaacgccaacgtgttccgtgcaaccttcaccgacccgttccagggcatcaagatggctgactacgcttacaagaagctgggctacaccaaggcagccgttatcttccagaagggcgctgactacaacgagggtctggccgagaatttcgtgaccgagttcgagagcctgggcggcaccgtcgtggatcaggagagctactccgagggcgatgtggactacaagacccagctgaccaccattctgggcaagggtcccgaggtagtgttctgccccaactactatcaggaaattggtcagatccttgcgcaggctgagagcgttggcctgaacgttcccttcctgggcggcgacggctgggatggtctggagggctacgctaccgccgaccagctgaaggatgcttacttctgcgcaaactacgcaaagggctccaaccctgactttgagaacgcctacaaggctgagtacggcgaggagtaccccaacggctttgcacctctgggctacgatgcagccatgaccgttgtgtacggcatcaaggcagctgaggagcagggcctcgaggctggctctgacgagtacaagcaggccgtcatcgacgccattgccggcggcaccatcgagggcatcaccggcacctttaccttcgacgagcaccacaaccccgtcaagcagaccgcgatcctgtgcttcgacggcgcaacccccgtgctgaaggaaatgttctgatctgcgccgttccatccaccggtgatggagccacccgcacagagcaaaccccatgattttctggagaacgccggaacagcttttttctggtcaggcgttctccgttttttatatcaaaaagtgtaaacgccgcaaagaaaggaagtatccaaccatgacagtgttctttagccagctgatcaacggcttgtcccttggcagcatctatgcactgatcgcactgggctacagcatggtgtacggcattatcctgctgctgaactttgcccacggcgatgtcatcatggtgggcgcatatatgtcgtggttcgtcatgaaccagctgggtctcggcccggtcaccgccgtgtgcgccaccatcatcacctgtacgctgctgggcgtggtgatcgaaaaaattgcctacacccccctgcgcagcgcaccccgcatctcgctgctgatcaccgccattggtgtctccttctttctggagtacacggcagaactgatcctcggctcgggtgcaaaggtgatccccgcctactacaccaaccagaccttccgtctgggcaaggtgccgctgggtcttacctccatcatcacgctggtggtcaccgtgctgtccatgctggtgctcacctttctggtgcaaaagactaagcttggcaaggccatgcgcgccgtttcggaggatatggatgctgcccgcctgatgggcatcaacgtcaacagcaccatctcctttacctttgccgtgggctcggcgctggcgggcatcggcagcgtgctgtactgctgctcctacccgcaggctacccccaccatgggctccatgctgggtctgaaagcctttgttgccgccgtgctgggcggcatcggttccattccgggtgccatgatcggcggcattgccatcggtctgtgcgagtgctttgtttccgccatcggcctttccgcttggaaagacgctgttacgtttgcaattctgatcatcgtgctgctggtcaagcccacgggcttccttggccgcaaggtgcaggaaaaggtgtaagggggcataacgatgaaaaccaaccgtaaaaccatcaaaatgcccgtgcgctacctgatgaacgccgtgctggtggcgctgctgttcgtggggctttccttcctcacccagaatgtgctgtccacctaccagaacaaggtgctgctgaccgtgggcatcaacattattctggctgtctcgctgaacgttgccaccggttatctggggcagctgccgctgggtcacgccggttttatggccgtgggtgcctacacctgcgcgctgtttacgaagtattccaacctgcccaagggcgttgcctttgttatcggtctggtgctggcatggatcatggccgggctgttcggggtgctcatcggcatccccgccctgcgcctgaccggcgactatctggccatcctgacgctgggctttggcgagatcatccgcatcaccttgaacaacattgatgatgtgctgggcttcaagctgttctacggcgcaaagggcctgaagaacatccccaagtactccaactactggaatgtattcctgtgcgtggtcatcacctgcttcctcatccacgccatgatgaagagccgccacggccgcgccgtgctggccatccgcgacaacgagatcgccgccgaaagctgcggcatccagaccacctactataaggtgatggcctttgccttctccgccgcctttgcaggcttggcgggcggcctgtacgcctgctatctgggcgtgctggatccctccaccttcggctttatgaagtccatcgaaattctggtcatggtggtgctgggcggcatgggctccatgctgggttccatcctgtccgctaccgtgctgaccatcctgcccgaggctacccgcagctttgagagctaccgcatggtggtctactcgctggtgctggtgttgatgatgatcttccgcccgggtggactgctgggcagctacgatttctccctgagccgcatcgtggaaaagaccatgaacggcgaactgttccgcaaacataccaaaaaggaggccgctgaccatgagtgagttcaagaccagactgcacagtgttccctccggcggttttctgaccgaccgcgacaaggacaaaaaacccattctggacgtgcgtgagctgggtatcgacttcggcggtctgaccgccgtggacaactttaacctgatgatcggccgcaacgagatcgccggtctgatcggccccaacggcgcaggcaagaccaccgtgttcaacctgctcaccaacgtctaccagcccacccgcggctccatcctgatcgacgggatgcctaccgccgggaaaaagacctatcaggtcaaccgcatgggcgtggcgcgcaccttccagaacatccgtctgttcaaggagctgagcgtcatcgataacatcaaggtgggtctgcacgagtctatgaagtataatctggcctcctccctgctgcggatgccgaactactggaaagaggaaaaaaagtgcaccgagcgtgcgctggaactgctggacatcttccacatggcagaccttgccaacgcacaggccggcagcctgccctacggcgcacagcgccggctagagatcatgcgcgcactggctaccggcccgaagcttctgctgctggacgagcctgccgccggtatgaacccctccgagacggcggagctgaccgagaccatccgccgcatccgcgacgagttcaacattgccgtgctgctcattgagcacgatatgagccttgtcatgggcatctgcgagggcattgcggtgctgaactttggccgcatcatcgccaagggcaccccggacgagatccgcgataacccgcaggtcatcgaagcctatctgggcaaaaaggagggctgagccatggctgatacattactgaaggtggacggcatcaacgtctactacggcaacatccacgccgtaaaggatatctccttcaccgtcaacacgggcgagatcgtcaccctgatcggtgccaacggcgcgggcaaatccaccaccctgaaaaccatttccggccttctgaaaccccgcaccggcgatgtgctgtacaagggcaaaagcatcaagggcgtgcgcgcccacaagatcgtggaaagcggccttgcacaggtgccggagggacgccatgtgttcctacacatgacggtggacgagaaccttgacatgggcgcgtacacccagcccgcttccaccattgccgccaacaaggaaaaggtgttcaccctgttcccccgcctgaaggagcgccgcaagcagctggcgggcaccatgtccggcggcgagcagcagatgctggccatggggcgtgcgctcatgagcaacgcttccatgctgatgctggacgagccttccatgggtctttcgccgctgctggtgcaggagatctttgacatcatccgcgacatccacaaggagggcatgaccatcctgctggtggagcagaatgcgcagatggcgctttcggtggccgaccgcgcctatgtgctggagaccggccgcgtggtcatggacggcaccggtgccgagctgctgaccaacgagcgcgtccgcagcgcctatctgggcgggtaaacggaaaaatagtttgatttgcagtttcgaaacgcccttgggcgtttcggaactgctttttcctgctatcactttactttcgtaaaaaattgtgccataatgggtgcagtattccggctttgcaaaagccacgccccggctcgggaaagcggggcgcaaaccacacagaatgaggggtaaacgttatgagcaagatcatcatcccggcaaactacaaacccgcgctgaacctgtacgacacccagcgcgccatcggcacggtgaagcggctgttcgccgataccctgtgcgctacgctgaacctgtaccgcgtatctgcaccgctgtttctggaggcttccaccggcctgaacgacgacctgaacggcgtggagcgcaaggtgacctttgacatcaaggacagcggcaccgaagcacaggtggtgcagtcgctggcaaagtggaagcgtcaggcactgaaggactacgatttccgcgtgggcaagggtctgtactgcgacatgaacgccatccgccgggacgaggagctggataacctccactcggtctatgtggaccagtgggactgggaaaagatcatcacggtggaggaccgcaacgagacctacctgaaaaacgtggtgcgctgcatcgtgtctgcggtgtgcgccaccgagatgaacctgcacgccatgttcccccagctgcaggatctgcccctgcacacccccaacgtgacctttgtcaccacgcaggagctggaggacaagtaccccgatctgaccccgaaggagcgggagaatgcctttgtcaaggagaacggcaccactttcctgatgaagatcggtgcaccgctgcgcagcggcaagccccacgacggccgcgccccggactacgacgactgggatctgaacggcgacctgctgttctggaatgacccgctgcagtgcagctacgagctgagcagcatgggcatccgcgtcagcccggagagcatggacaggcagctgaccatggcaggctgcgacgaccgccgcgccctgcccttccacaaggcagtgctggctggcgagctgccctacaccattggcggcggcatcggccagagccgcctgtgtatgctgctgctgggcagcgtccacatcggcgaggttcaggccagcgtgtgggacaaggccacccgcgaggcctgcgccaaggccggcatcccgctgctgtaagtattttgatttgaaatttctcccataaaacagaagaaggggcagctcgcaggctgtcccttcttctgttttatatattattagttttgctttttccagcggcgcatgacgcccatgcccagtgcataggggccggtgtgcaccgcaatggtgcagccgatctgcaacagccctacctcacactgtgcgccggggtacttggcgcgcagggcggcacgggtctgcatccacagacgcttgccctcgtcggcatcgtaaccgtagcccaccgtaatgcggtagtcgtccggggtgccgccgtgggcatccagatagttcatcagctgttccagcgccttttcaaagctcttctgccggccgcgggctacgccgccggagaagatctcgccctccttgaacaggatcatgggcttcagccccagcatattggcggcgcggccggtcaccttgccgatgcgcccgcccttgatgaggtagtccagatcacccacggtgaagaagatctggttggtggatttttccgcttccagccaagtcacagtctcgtccagcgtgcagcctgcgtcccgcatggccacggcgttttccaccatggtggattcggtcaccgtggcggcggcagagtcgatgacctcgatgcgggcgtcggggtagtcctccagcaccagatcccgggcgttgcgggcgctgcccacgcagccgctcattttgccggtgaacaccagacacagtacatcccgacccgtctcggcgtgtgcgcggaaggtcttttcaaagtcctcgatggaggccagactggtcttgggataggccgccgggttatctaccatgaactgatagaagtcccgcacagggatctccagcccttccttgcggtaatgttcaccgtccagcgatacataaaagggcacgacctcgatgccaagctgcttggcggtgtccagcgtcaggtcgcaggcgctgtcggtaatgatatcaaacatctgtgacgcttccttttctgaaactcaggggctgctttgggcggcagctcagccgcggtggatgtaggcttcgcgctctgcgcccaccgagatataggtgatcttgcagcccacagccttttccagatattccacataatcgcgggcctgctggggcagatcctcccacttgcgggctgcggtgatatcgcagtgccatccgggcaggtactccaccacaggctgtgcggtatccagtgcctcacccatggggaagcgggtggtggtggtgccatcggtcagcttgtaggcggtgaccatggggatcttttccatgtagtccagcacatccagcagggtcagggcaacctcgtcgcagccctggcagaacacgccgtagcggcttgccaccaggtcgatgggacccacgcggcggggacggccggtggctgcgccgtactcgtggccggcctcacgcagagcgtgcttctcttcctcggtcatggccagctcggcggtgaaggggccgtcacccacgcaggaggagtaggctttcatgacgccgatggagttgtgcagcttgtggccggggataccggcgccgatgggtgcataagcaccgatgacgttggaggaggtggtgtaggggtagatgccaaagtcgatatcgcgcagtgcgcccagctgtgcttcaaacagcaccttcttgccggctgcatcggcatcggccagatactgacccacatcgcagatatagtccttgaagatggcggcatacttttcgagccagttccacatctcgtccacgctgatgggcgctgcgttgtagctgccctccatgaccagattcttggaatccaccatggtgaccagacgcttcttcacggcgtcgtccagatgcagcagatcgcccatgcgcagggtctttttcatgtacttgtcgccgtaagcgtaggcaatgccgcgcttggtggagccgaactgtgcgccggtcttggacaggcgtgcttcctccagaccatcctgctccacatgatagggcatggtgatggttgcgcggtcggagatcttcaggttctccggggtgatcttaatgccctgctcgcgcagcttattgatctcgccgtccagatgatgcgggtcgatgaccatgccgttgcccatgacgcagacgacattggggcgaaggatgccggagggcagcaggttcagcacgaacttgccgcgctcgtttttaacggtatggcctgcgttgttgccgccctgataccgtgcaacgatgtcgtactcctggctgatcaggtcgaccatgcggcccttgccctcatcgccccagttgatacccgtaattgcagtaagcataataaatgacctctttatccttttttcaaaagacagccttttccgtgcaccttgcccgggatacgctaccttgggtaaaacgcaccggctcgctgcccttgcggcacgcaccaatgctattatagtatagcacagtctgccgcgcaaaaaaaggggctgttgtaaaatacaacgccccttttatacagatatatccgattgacaaaacagccgcccggtctgcccggacggctgctttgcacggaaaagcgctttttccgcacgcccgttttactggataaagcccacgaacaccgggcagagcacggcggtcagcacaccggctacggcaatggaaaggccgctcatggcaccttccacctcgcccatctgcagtgccttgctggtgcccacggcatgggctgccgtgccgatgcccacgcccttggcgatagggtcggtgatgtggaacagcttgcacacggtctcggccagcagtgcgcccacgatgccggtgacgatgacgatggcaccggtcagggcggcaatgccgcccagctctgctgccacgtccatgctgatggcggtggtcacagacttcggcagcagggtggcgtactgctcctgggtcaggtccatcgccagtgccaatgcaaaggcgctgcccagactgaccagcgtgcccaccgagatgcccgcaatgatggcgggcgcgttctctttgagcaggtccagcttttcatacagcgggatcgccagcgccaccgtagcgggcagcagcagatagcttaccggcgcggcgctggttttatagtccccataggggatattgcacaccgacagaaaaatgatgacaaaaatactgcccagcagcagcgggttaaagacggccttgccggtcacccggttgatgagcgcacccagcccaaaggccgccagcgtaagcagcacgccccaggccgcagagccgttcaaaaagttattcagcagttccgtcatggtcggcctcctcctttttattacgggcggtcagcgcctgcgtggtgcggcctgccgccgccatcaccagcaccgtcaccggcagaatggcgatcaggatgggcagcagcagctgtcccatctctgcccacagctccatgatgcccgcagcagcgggcacgaacagcagcggaaaaataccggtcaggtaggtgccggtctccttgacctgctccagctttacgatcccggcggtcagggctgccagcagcagcaccagaccgtacacactggcaggcaccggcagcggcagcaccacgtgcagcacctcgcccagaaaacagaacgcgagaatgcgcccgaactgaaaaatatacttcgtgtcagaactcccctttctggtcttttaacgaacagacaacgggcttttcgcccggaattttctgccttacacaaagtaaaagtataccgcggacagcccgccccatcaaccgtaaatcttgccaagaagttctgcaccttttgcgcagaactgtacaaaaaaacgcaccgagccaaggccggtgcgcagaatcaattattcctgataggtaaaatgacagcgtgggtaattcgagcatccccagaaggtttgccctgcgtgatttcctcgttgagctaccctcataacaagctgtccgccgcatcgcggacaagtccaagttccatccgcttgaacgactggatattgctttgcctgaacgtctcttatatgggcgtctttttgccagccgcttgcttctgtgaaattcacaagtattgcataaagtgcatccattttctcatctgatagctgagtgcctgtacaccgagcattatactcaatatcccttcggagatatagggcataggtcacatgatgctttccgcttgtgagctgaatgttctttagttcacaattgtttccaaatactacataggaatagtatgggacagtatcatccttcagcagttccatcaatgcgcaaatatgcgtctcattctgccggagagggttataaaaggagtacttttgcgttgtatgaaattttcccctcagacattgcgtccaatgctcttgctcttcattgccgaaaatccagccactgtaatttttggattcgattacataaagtccggactcgtgcagaaagaccatgtcaatctcagttgttcctttttgacctaccgggatataacaattcggtaaaagagctttacgaccgtggactttgttcagggcattataaataatgttttctccagcgtctccccgtttctccgggctacgaaaatcccatcgaaattgctcaaacacgataatgtcctcaaatcacataatcgttgccggcctgatccggcagggcaaggtctgccagcgtgatcttgccaaagtagtccgagatcaggtcgttgagccccttccacatctcgtaggtgcggcagttggccatccgggcgcaggcagaagctccgggggtcaggcagcttaccggagcaagactgccctcggtgagcatcaggatctcgcttaccgtgtactgatccgggctgcgggtcagccggtagccgccgcccttgccgcgcagcccctccagaaagccgttctgcaccagcaccttgaggatgttctccagatacttttccgagatctcctgccgggcggctacttcctttaagggaacatatttttcagactgatgctccgcgaggtcgatcatcacccgcagcgcatagcgtcctttggtcgaaacgatcataatccgtacttccttccggtcaaattttaatataacccattatacaacagggtaaatcacttttcaatcccacttttttcaaaataacccttgacaagcagggaaaacagggctataatgccatcaaacccacaaataatgttggtttaaaggtttagagggaatcacagccgggctcaccggcacaagacagggtcatacaccccgtaacgataccagaaagagggacaagtattatgagcaagatctatacctccgcagatcagttgatcggtcacaccccgctgctggagctcagccatatcgagaaggaagagcagctgcccgcccacgttattgccaagctggagtacttcaaccccgccggttctgtgaaagaccgcattgcgaaaaagatgatcgacgacgccgaggccaagggtctgctgaaggaaggctccgtcatcatcgagcccacctccggcaacaccggcatcggtctggctgctgtggcagctgccaagggctaccgcatcatcatcgtgatgcccgagaccatgagcgtggagcgccgccagctgatgaaagcttacggtgccgaactggtgctgagcgagggtgccaagggcatgaagggtgccattgccaaggccgatgagctggcaaaggagatccccaattccttcatccccggccagttcgtgaaccccgctaacccgcaggcgcatatcgagaccaccggccccgagatctgggaagataccgacggcaaggtcgatatctttgtggcaggcgttggcaccggcggcaccgtgaccggcgttggcaagtacctcaagagcaagaatcccgccgtcaaggtggtggccgttgagcccgcttcctcccctgtgctgagcaagggcactgctggtgctcataagattcagggcatcggcgccggctttgtgccggacgtgctggataccaccgtctatgacgagatcatcgccgtggagaacgacgatgccttcgccaccggccgtctgattggccacaaggaaggcgtgctggtaggcatctcctccggtgctgctgtctgggccgccatccagctggcaaagcgccctgagaacgcaggcaagaacatcgttgtcctgctgcccgataccggcgaccgttacctgtccaccccgctgtttgcggaataatctcaaaaaactctcctctcccgctctgcaccccgcagggcgggagtttttgtttgggaacaggacgatttgaatgcgctccgcgttgctctgcgcatagtcagcggaagaattatttttaactcgggattctgaaaagcctgcgggcttttcagaatccccttttcacaggtggggtttggaacgaactccctcagtcaaaacctgacggttttgccagctccctctgggagggagcctctggcgcacccgcaaactttgcactttagccggaaactgtaccgccatgccaaaggccccatcttagagggggctggcatcgcgcagcgatgactgggggagtttccccgtcctctcccctttcccctcacccgattttatgctacaataccggtaacaaaaacgtttggagaaacgcccatgctttattatgctgcccccatggaggggtttacagaccgggtctggcggcagacccatcagaaatggttcggcgcacaaggcgctgccgaccgctattatgcgccgtttatctccccgccggagaaccgggtgctcattaaaaagaagatggcagagcttgccccggcagcaaaccccggtgcgccggtcatcccgcaattgctggcgaaggacggcgagctggctgcttggatgatcgggcagctgcgggcgctgggctataccgaagtgaacctgaatctgggctgtcccgccgggacggtgaccgccaagggcaagggctccgggatgctgcgggacccggccaaggtagacgcctttctggacggggtattctcccgcgccgaggggcctgtctcggtcaagacccggctgggtgtggagaagccggaagagtttgccgccattctggaaatttataatcgctaccccatctcggagctgaccatccatccccgggtgatgcggcagcagtaccgcggacaggccgaccgcgccgcctttgcggctgcactgccccggtgcaccatgccggtgtgctacaacggcgatgtgaccaccgccgcccagctccacgcgctggaagaagagtttcccgccctgtccggcatcatggtggggcgcgggctcattgctgacccggcgctcttccgcagggcgcggggcggtgcgcccgccgccaaagaggagctgcggggctacctgaccgacctgtaccacggctacactgaactgttcggcagcgcgggctgcgccatcagccggatgaaagggcactggttctacctcatccactgctttgccggggcggaaaagctggaaaagcagctgaaaaagctgcgggagccgtgggagtacgaggtggtggtgaaccagatcttcaccctgccgctggtgaagcagatatccatataaaaagctgtacaagggcagcagcctcgccctctccgtctgctcactacgttcgcatccacctctcccaaagggagaggccttggcaaagagatgaactttgcgtggactgccaaaggctctccctttgagaaaagacttcccccgcgccgggggaagatgtcgcgcagcgacaaaagggggaatctggcaaatccgacaggatttgactgagagggcgagcatactaaaagcaaaagcatctgcaataaaaaagcccgccgtcttgcaagacagcggggctgaaaaggaccgtattacacgttgaggtagctgcgcagcatagcctgcagcagatcgtcacgatccaccttgcggatcatggcacgggcattcttataggtcgtaatgtaggtagggtcttcggacaaaatgtagcccaccagctgattgaccgggttatagcctttttccttcaaagcatcgtacacctgctgtacgatctcgtggatctcatagtcctttttatcgtggatggagaaaatcgcggttgcgtctcccacgcaatacacccccttcggttgaaactagtctcattgtacacgaaatgcgccgaaacttcaagataattacgccggatttgcacatcctgtacaaaatttccagcaatgttccggcaagatgaacgatgtccgggcggcattctgcccgcgaaaggagcctttgtatgctttacggcatcggctgcgacctgtgcagcctttcccatctggaaaaaagcctttcctctgcccacgcagcagcctttgtgcgccgggtgtacggcccgactgagcaggcggcgctggggcttttggaaggctctgctgcgccgctgaacgcccaccgccttgccagcgccgccgcagattttgccgccaaggaagcctttctcaaggcggcaggcaccggcctgcgggagcctttttccctgcgggagatcgaggccgtccggcaggaaaacggtgccccggcctaccggttcagtgggcagaccgccgtatgggtggcgcagcaccggctgcgcgcccagctctccctgagccacgagggcggcatggcgctggccttctgcacgctggaagaggaaagctgactgccttttgtgcatacaatggaatatcgcccccgcactgcataagccgcacccggtctgcgcatactgagagcagacaggatgcgccggacgcatcacatagcggggcacatcctccagacaaacaggagggagattccatggaggtacacagaggagaagttttctacgccgatctttcgccggtggtgggctcggagcagggcggtgtgcgcccggtgctgatcgtacagaacgagatcggcaaccggcacagccccactgtgatcgcggcagccattacatcccggctggacaagacccgcctgcccacccacatcaacatccgggcggcggacaccggccttgccaaggacagcgtggtgctgctggaacagatccgcacgctggataagcaccgcctgcgggagcgcgccgggcagatcaccgccgccgatcagaagcgggtggatcaggcgctggacgtaagccttgggctgagctcgtactaaaaaacaagcggaaagattatttataatttcgggacaccggagcgtctgcggacgctccggtgtcccattttcacgggaaaggatttgtgaaaccccacctataacaaaaggtaaatttgcgaaaaagacgtgacgaaacggcgcagatgtggtatcgttaaagggtagatttttgttcggaaaggatttctttgctatgacccggatcgctttctgtgatgacgatgccgccctgctgcatcagatgcaggattttctggagcagtaccgtgccctgcggggtgtgcagctggagctgtttccctatacaaaacccatggagcttctggcagatatcgaagccggggtacgctttgacgtgctgtttttagatgtgctcatgcccggcatcaacggcatcaatgccgcgcgggagatccgccagtacgacacggcggtgcagatcatctttgtgacctcttcttcggaatttgccgtacagtcctatgtggtaggcgcatactactaccagctcaagcccatctggaaggacagctttttccgccttaccgatgctgtgctggccgagtgccgcaagcgcacccagcacagcctgatcctgcgctgtaaaagcggcgtgacccgcattacactggacagtctggaatactgcgaggtgcaggggcgcacgctggtattccatctgctggacggcaccgtcatcgagagcagcggcagcatggacgagctggcacggcagctggcagattacccgggctttctgcgcccgcaccgctcctatctggtaaacatggagtacatccagaacatcaccgccaagagcatcaccatggaaagccttgccgaggtgccgctgccccacgggcgctttaccgccgtgcgggatcagtatctggaatacgcctttgcgggaaagaaggtcgtcctgtgaccgccccgggcattctgctggaagtgctggacggcgcagcagtaggcattttcggcatcctgctcagtgcggcgttctgccccatccgctggacgggcaaaaagcgctgggcgctggcaggctgcaccgccgggctgctggcactgcagggcatcttctactttggcaccagtcccacggctgcccagtacctttaccccctcatcacccacctgccgctgtatctcgtactggtgctgttcagcggacagaaggtctggccgctggtggcggtgctcacggcctacctgtgctgtcaggtgcggcgctgggcggcgctggccgtggcgctgttcttcccgcagcatccgctggtgcagccggtggctgagctgctgttcaccctgccgctgctgttgctgttcatccggttccttgccccctccatgcggcagctttcccgctacccggcttccgtacagtgccagtttggcatcgtaccgctggtgggttatctctttgattacatcacccgtgtctacaccagccttttgtccggtgcaaacccggcggcggtggagttcatgttctttgtgtgctgcgcagcctttttgtgctctattttgcgcgcctcccgggtggagcggcagcgcatccagatggagcagctgcagaccagcctgaacttgcaggtcacgcaggccatgcgcgagatcgaagcactgcgcctttcccagcagcgcgccagcacctaccgccacgacctgcgccaccatatgcagtttctggcaggctgcatcgagaatggccgcaccgagcaggcgctgggctacatccgcagcgtgtgcagcgagatcgaggccggcaaggtgaccgtctactgcgagaacgaagctgcgaatctcatcttttctgcctttgcagaccgcgccgccaaggccggggtacagttcacggtgcaggcaggcatctcgcaaaagccggccgtctcggagagcgatctgtgcgtgctgctttccaacgcactggaaaacgccctgcacgccgccgtgcgctgccgcgaagccgggcacgaagcctttattgagacctccgggcacgaaaaaggccacaagctgtttttgcagatcaccaacagctgtctgccggacgtgcagctccgggatggcatcccggtcaccgaccagcccggccacgggcttggggtgcgcagcatctgcgccatctcagagcggtacggcggcctgaccagctttgccgcaaaggacggacaattcaccctgcgggtaatgttataatgaaaagggtatcggaaccgccgcggcgtttccgatacccttttttacaacatgaatttctctctgtgaaaatgggacaccggagcgtccgcagacgctccggtgtcccgaaatcaaaaatattctttccgctgaacatggccaaagcaaagcggaggccatgcaaaatcgtcttattacagctgctgcttgcccagcacgtcagaggtaggggtctggaacaccgggatgccggcataggggtcggcagcggtgtcggcgggcaggctcttcatatattcgtccatggcgacagccaccttcttggcaacagccacagcctccaccacggtgcgtgcgcccatgacggcgtcgccgccggcaaacacgccctcgcgggtggtgcggccgtcctcgctgacgctcagcagacccttctggtcggtctcgatgccggtcgtggtcttgacgaggttgctctcagagccctgactgaccgacacgatgacgccggtgtgggggtacaaagtctcgctgccctccacctgcgtgaacttgccgtcctcgcccttgacggtgtcgcggcagatcaggccgttttcccggatctccaccggtgccttgcagaagcggaagcccacgccctccagcttggcgtagctgacctcgtactcggaagcgctgatgcagctttcgtcccggcgggcgtagcaggtaacatggcgggcaccgttgcggatagcggtgcgggcgcagtccatggcggagttgcccacgccaatgacagccacgtcatcgcccagacggaaagccttggagtttgccagatagtcgatgccaaaggccacgttgccaaggctctcgcccttgatgtgcatggcgttggccttccacagaccggcaccgatgaacacgctcttgtagccgtcgcggaacaggtcatcgatggtgatggtcttgccgatggtagtgttggggcgcaccttgatgcccttcagctccagatggcggtactggaaatcgtccagcacgctgtccggcaggcggtagttggggatgccgtagcgcatcacgccgccgatcttatcccgggcgtcaaagatggtcacatcgtagccccagcgtgccagcagcacggcgatggtcaggcccgccgggccggagcccaccacagcagccttcatgccgtttttcggggcagggcctgcggtcatcttgttggcgtaggtggtggagatatagtcctcgatgatggaaaagtgcaccgggtcgtggctgggcatccggttgcggatgcagtggccctcgcactgcttttcgtggttgcacaccagactgcacacggtggtcaggggattgttttcaaacagcatccggcctgcattgtccatctggtttgccttgagcagacggatgacctccgggatattggtgtggatggggcagccctcctgacacatcggctttttgcagccgaggcagcggttggcttcgtccagaacatgaagtgccatgggttcctccttgtgtttcccctgcggggacagtcgttttttacaagctcgttgtatccaacattgcattgctttaatcatacacccgaaccgcgccggatacaagagggcacaatataaaatttttcacgttattttttgtcaattcgtcaaaaagataattttttgacgatatatcccgcccatcggctccggttttgcccggcacagcgcaccaaggtcgctggccctgctttgggcggcagccatttgggcgcaggtcccgttttcccgcgcaagccgcgccagcgagtgggacagcggcagcgccgtttctccgagcaggggcagcgcttccttgcgcgcgcccagcaggtgcagatagggcggcagcgccggggtctgggcggtgtagcccagcgccgcatccatcgccagccgccgcattcgcgcccgggggtagcgcacggtagtcagggcgtccagcaaagcgggcaggcttgctgtctcccgcacggcgttttccagccgatgctccaacccctcggataccccgcgcaccgcggcaaagggagcttgccctgcgcaggctgcccgcagcagcgccagctcgcagtgccccatgactgcaaaatctgtatactttccgtcatattccgattgtatatacaattttagtgccttttccggcacataaggagccagcgccgccgcgccgccctccgcccagagcgtccgcagggcgctggcgctggcaaaggctgcatgagcgctttcggtcagcgcctgcccgtggtctgcgccctgccggggcagggcgatgggctgcatttctacattttgttctatgatggctttacaatactctacggcaagattattgttgggcttgtccagcaaggcggcaatgtccgaccccggacacagcgcctgcaccgccgcctgccgggcagcggcaaagctgcgtgccccggcggcaagctgctgcctgagcgcggtgcggtattcttcgctgcacagcacccgggcggctttttgcagcagagcggtgtccggggtctctgccccaaagaccagtgcgtcgcacccggcagcggccagaatgcgcacgcccgcccgggcaaaggcctcggcaccggcgcaggcgcagggcgcgggcagggcaaacacaaggtctgccccgcaggccagcgccgcctgcacccgcaccgtctccggcaaaagcggcagcgcaccccgctgggtaagcccgcagctcatggcaacagccacccgctgcgcccccagtgcccgcgcctgcgccagctgccatgcgtggccgttgtggaaggggtcgtactccgcaatgatgcctgcaaacttcatggaactgctccttttcgccgaaagattgttaaatttatatcggatatacagaaaagccctgtcgtttccgggatttgtgggcaggatgtacaaaaaccttgtacacaagttttaccgctttgcccgggttgcgccttgaaaagccgccatccctattatataataaacataggaatctgtaaaattctgtccgcaggtttttcaggctgcggacggtacaaaaattttcaggaggcaacacagatgaaagttctggttattaactgcggttcttcttccctgaagtatcagctgatcgatatggacggcgagaaggtgctgtgcaaaggcctgtgcgagcgcatcggcatggagagcagcatgatcactcacgaggccaacggcaccaaggctaccaccccggcgatcttccccacccacaccgaggcttttgccgaggtcgtgaagaagatgaccaccggcgccggcaagtgcatcaatgacgtgagcgagatcgacgccatcggtcaccgcgtcgtgcacggcggcgagaagttcaagagcagctgcctgatcaccgatgaggtcatcaacaccctgcgcgagctgagcccgctggctcccctgcacaaccccgccggtattctgggtatcgaagccgcccgcaaggtgttcggcaacattcccatggtagccgtgttcgacaccgctttccacagcaccatgccgccgaaggcttatatgtacgccattccctacgagtactacgagaagtacggcgtgcgccgctatggcttccacggcaccagccacaagtatgttgcccacaaggcagccgagtatctggaggagcccattgagcgcctgaagctgatcacctgccatctgggcaacggttcttccattgccgcagtcgatcagggcaaggtggtggatacctccatgggcatgaccccgctggccggcctgatgatgggcacccgttgcggcgacctggacccctctgtggtcaactacctgaagtacaccctgaacatcaccggccacgagctggacgagatcctgaacaagaagtccggcctgctgggcatctccggtgtttccagcgacaagcgtgacgtggaagaggctgccgaggccggcaacaagcgcgcacagctggcttccgatatgctgaactatcagatcaaaaagaccatcggcagctacattgcagccatgggcggcgtggatgccatcgtctttaccggcggcatcggcgagcacgatgccattgcccgtgcaaagatctgccaccacatggattggctgggcatccgcatcgacaccgagaagaacaagcaccctgttggcgatgtgtgcgagatcaccgcttggggcgcaaaggtgcgcacgctggtcattgctaccgacgaggagctgatgattgcccgcgacaccaaggaagtcatcgaagagaagtaagcttttcccaaagggctttgcaggggctgctgcacagaatgtgcggcagccccttttgtttgtgccaaaatgcgtttgtcgcggccgcaggccgcgacaaacgcgaaatataataaattttcctctatttatggccagagcacaagcggaggccatttccaatcgtctgcgtccaaaagcggcgcgccgcttttctatcttccggcggtgattttacccaaatatatgctgtcggtttgtgccatgtgtacaaataaaagggcgaacggttgttttttggttgacaaatctcaaaaataacggtacaataggaaagtcctcaatccgagggcgtttatctattcaagcccctggtaagcttactgatcagcgcgatggtcccaaaaccaaaggtatggttacaatccttccgtgggcaagaactaactaaagaggagatactactatgtttgaagacaagactctggtctgcaaggactgcggtaaggaatttgtttggactgccggcgagcaggagttctacgcttctcgcggcttcgagaaccagccccagcgctgcaagccctgccgtgacgcccgcaagaacggcggcgcacgcagcaacagcggcgagcgtcagatgttcgacgctgtctgcgcagcttgcggcaagacctgcaaggttcccttccagccccgtgaggaccgtccggtctactgctctgactgcttcgctcgcatgaagcagaactaagcgctgattttcatttaaatcggtaacaaatccccccgctgcctgcttggcagcggggggatttttgcgttcctcttcaggtattcttgcgctgatttacacccgaaagcatcagcaccgtgcggtacagccgcagcttgagcagcagcagctttacccggtcgttccggctctgcatggcgtgcagcggggtgctgcgcaccgctgtgcgcacccggggcttttgcagcgcactgcgcagccaagcagtctgcttggcaagagaaagcgggctgcagccaaggttcttgacccccatcatcaggtcgcggacggtgcagtagttggcctttgcgcggtgcatagggctgtccagcaagccccacgcggcaacggtgtcccacaccgcatcgctcaggtagaagttatcttccagccgttccgggtggtagcggttggacagacttccccgccgggcgatgacataatggtacagcggcttttccagcaccaccagacagccggggttctggcgatagaatgctacgaagaacattccatcctcacccagctgatggggaggaaagcgcagatggtgctgttccagaaacgctctgcggtacattttgtttgcagccagatacgaggacgccatcttgtcgaaatgctccttgaagggctcgccccggtacacgccggaaaaggtatagtggtcggtttcagagtgcagcagctttccgttttcatcgcagatgtcgtaaaacatcccaaactgcacgcagtctgcgtccgcatcccgggcggcacggtacagcacctctgccgcatccggctccacccagtcgtccgggtccagaaagaaaatatattctccccgggcagcatccagacccgcattgcgggcagcggctacaccgccgttgggctggtcaataaagcgaaaccgcgcatcctcggcagcagcctgtgcgcacagcgcggcgctgccgtccttggagccatcgttgatgaggatggcctcgaagtcggtcaaagtctgcgcccgcagtgagcgcagcgcccggggcagcaggcgctccatattataaataggtactataaacgaaatacagggcatgatcccaactccttgaaatgattatcccggcaggccgagccgacgcagcagcggacgcagatgcagccgaccggcaagacggcagaacaggtacggcattaccagactgaccgcaccgcatacgagaactgtcccgcccgcagaaacgcccagtttttcatacagcacaagccccggcactgcgcagcaaaagggctggtgatacagatagaacagcatggtgttctgccccagcggaaccagccgccgcaggggcttttgcaacagcacacacgccgcccagatgcccacacagaacccgctgaccgcaaaatagtccacccatgtgcacacagcctctgcaagcaggccgtcaggccagaccatagtggggaacagcagtccccacaccacccacaggccgcacaaggcgccaaaaagcatcagcggctttgcgtgctgttcggccttttcacgcgggagcacgcagcccagaaagaaaaacgcgccctgctggaaataacttttcactgcccagaaccattcggtgaaaagcagctgatagcacacaggcagcgctaccaccagcaccagctttgccgcccgggctgctgccggggacagagctttgtccaacagccatgccgtgaggacaaaccagaacagcgtaggcagataccacagatgaaaaccataggggttctcgttgcgcagcaccaaccagagatattccgcaggctgttttaactggtatgcaccgccggacagcagcgcccgcaccggcggcactagattcgccagataaaacaaaaagtacaaaaaagccgaatatataccccagggcagcagcaggctgtgcgcctttttgcgcacgtattgccgggcggaaaggctgcggttcttctgcgcggtcagggtgcagcccataccggagagcagaaacagcagcgggacgtggaaccggtaaacaaaggtataagagaacgcacaccatggatgtgcggcacgcatggacatccgaaaggtatggccgtagatcaccagcagcaggccaactgccttggcgatgtcgatgtgatccagacgtttggtggtttgttgcattccgtcgccttacctttcgcccagctgcaaatactgctgctgtaagcgggcggcggcgatgttgatatcgtagcccgcctgccggatcagttctgcaccggcagagcggtcacagggctgttggagcatccgctgcaagcctgccgcccagtctgcattgctggcagaaagcgggatctggatggcgtggggcgaaagcagcacttcctccggcactgcgtccgaaaatacgcaccccagcccggcagcctgcgcctcgatgcccaccaccggcagaccctcgaagcgggaaggcatgacgaagagatccatcagctggtaccagtctgccacattgctttgcagcccggcaaacaggatatgatctgtgatgcccagtgtctgtgcctgtgcgcggacagcctgctccagcctgccggtgccgataagcaccagcatcgcccggggctccagctgcaaaaaggcggcaaagatctcgagcagacgctcgtggttcttgcggacgtcaaagcgtcctacatggcccagcaccacccggtcttccagcccgtagcgcgcccgcatttcggcgcggacggcggagtcgaaccggaaagtctccggctcgatggcgttgggaatgatctgtccccggcgctcccagtctgcttttccaaagtagtagatgcccgcatcccgtccgcaggcccacaggtgggtggcggcaccgggcagcagctgcttgcagaacatcttcagcggccacttgtagtcccggacgatccagatattatgggcgtgggcaatgcgcacttgcagccccgccttctccgcgcccttcagggcgtacagacccatggcctcgttgtgagcgtgcaggatgcggatgcggggatctgcggtcacagtctgctgcacaaagcgcagatacgccgggtaatgcagcgggtcaagtcccgggctttggtagatgtgcccgcccagacggcggatctcgtcgtcgtagtcgccgggctttttcttgttgacgataaaatcaaactgaaccttgctgcggtcgatatgccggtagtagttcatcagcatggtctcgatcccgccgcggtccatattgctgaccgaatgcagcactcgtatcatggggtactcctcacattataacaactgaaatcttctgccgtagcggcaccacagcccaaagtcctgctgccgcagcgcacgggcgccccagcgagcacggcggggcagtgcgctctcctgcggcagcgccttggcatacagtgcgcagcacagccggaaaacggcctgctgcgtttcctgcggcaatccagatatggtggcatagcaaaaagccgaaagctgcagcgtcaggctgcagcggtacagggcatcgtggggcaagcccagcgcggcatcctgcgccagcagctgctccatgatccagtagctctgcacggctgcagggcggtgctggctggtggcggtaagtcccttggggtttttgcgccacaggtagacgacctccggcacagagaccactgcttttgcctgacggaacaccagaaaatggatgatggtatcctcaaagcaggtatagtaagccggaaagcgcacctgtgcaaacagctcccgccggtagattttaccccatggcattccgggcagctcaaatcgctccggcgcagcgttaccgatgtagaccgccgccgggtagcactgcaccggaccgtagctgccatctgtgtacaggtactgccagccgccctgcaccacatcggcatcaaggcgctgtgcggcctccagcagggtacggattgcaccgggcaataacagatcatcgctgtccacgaacatcagccagcgccccacggcatggcgcagcccttcgttgcgggcggcagcagcgctgcggggtgcgatgcaattgcacagcaccaccccgggctgtgcccggtagcgttccagcacagcggctgtaccgtcggtggaatcgctgtccaccacgatcagctgcacggtgcagtcggtatcctgctgcaaaatgctgtccagacaagcagcaatggtggcttcgccgttatacaccggcacgatgaccgaaagcgtcaccgccgggtcctgcggcggcagcggcgggcattccccctccgctgcgggcttcggacacaatgctgtcagcgcagcacggtcggcctgtgtgctgtccggcagcggtgcaccgccccggtgcagcagatggtacaacgcaaggtctgcgtggccgcaggcggcggcgcacacggcggcagcacccgccagcagacggctgtgggtgcggcattggatcaactggtaagcgcgtcggttgcggatcatactccacctctttcgatcccggcaagggcagagccgccctcctctgcgatcagggacatctttttctgcgccgtgcgcaccagatcccgcacattatagatatcatcctccgaagaggtcgcccatgcggcggtgaacaggatggggtactccgggttcagcttgttgtactcgtccacctgactttgcaggatgcggatcatgacctctgccttccggctgctgcactcaccaaagaaggcaaggaacttgcccacgccgttgtagccaaccacgccgtcggtatcacccatcagctgcagcagaccggaaaaatccttcaggatgccatcgcctacatggtagccgaagcggcggctcatatcggacagattatccagctgcaaagcaaagcaggtataatcttccggcaggatgcggtctgccatactgctgatataaacattgagcttttcgcggttgggcagcccggtctttttgtccacatacagcagataatccacgatatcggagatacggcccagcagaacggcaccgcagcagccgatgacgaagaacagcaccagcgccagcatcagatacagcttgacgttgatagcagcagccacctgcaccgagctgatcatcttcagataatccgcgctgatgtacaggttcagttccttgctgctggtattgatgatctcgtagtattttttcagctctgtctcgtaatcattgatcaggctttccatcttggcgtgctgctcgtccgtgccgccaaaatccatattgcggaagctttgcaggatctcctcctggaactgccggtcgatctggctggcagccacctgctgttccagcgacaccagcttcagcaccagaccatcataggtggtctgcgccttttcgcctgcgccctccagctcaatgttgttcaggatgtattctgcggacaccacctcgccccggtcggtaaagtagtttttcagcaggtcggcgttcttgcacacatactgatccgtcagtccccacagactgtcccgctgctcggtggtgatctgttcggtctgctttgcggtctcaatgcagttggccagatactcctgcagcactgtgccgtcccgcacctgcgggccattgagcacataggcgtacagttccggaatggtgtattttttgaaatcggtatagatatcgcacaggtctgcataggtgtagccggtgcgggaagaacggaagtccgggtaactttcctgcttgttctgcagataggcctgcatctcattggtatcgttttccagaatgcgaatgcactcgtagtagtcgtagccgttgtccagcaagccggaggatgggttgagcgaaagcttctgctccacatatttttccgtataataggtacagtagctctggatgatggcatccagcatattgcgggcgtagcctgcaccctgtgacccgtccaccacaaggctcaccttgtaagtatcggggaaataggtcacctcttcgcccttatccagcagcgcatcattgatggtctgctgatcctctgaaatcaccggggtcaccgaaatgttggaacggatggtgctcagccgcccggaagcgcccagcgcgtccatggcctgcgagatgaccgtggaggaatagatctcgttgacatccagatcgctgccgtccggggtgtagccgtcggaaatgccgtcgttggtatagcggatgatgaccgacgcggtgtactgttgcttgccatccgcatacagatagatggcggcggcacctgccagcgacaccagaaagatcaggatgctgaaacgcttcagatagcgcaggatctcaaactttttcatttgcgttttcctgcctttctacgtttgcgctgctggagcagccatgcgccgcccagcatgacggcaacggactccatcagcgtctttttcagactcaggcgctgcaggaaggagactgcgccatagctaaaggtgatatagttctgggatttgtacttgatatacgctttatccagtacaaacagctcctccgagatctcgttgatggcgttttccagtttgttcaccatggcctgtgcttcggccagacgcggctgtccggcatccagctcccggatcttctggttcacataattcgtgctcacgatctcggtctggtaaccggtggcatcggacagggcactatctgccgcccgcgccagcgcgtccatggcggtcttggtgcgggacatatagtattcgctgtcctcatccacggtggggatcatcatgatggaagtcatggatttttcgtagatggaaattccctttttgtctgcatcataataggcttgtttcttgcgcatggcaatatcgtcgatcttgttcttgtattccagaatactggtcagcatggacggatcccgggcaacgccgccttcgatcacaaaggccatggcattgggcagatcgtaatccaccagattgttgatctttttgcccatcgtagtaaagttgttggtggaggaatccgggttcgcatcatccgtaaagcttttgttctcctgcaggcgggtgttcaggtagcggttcagcccctcagcgcgcacctccagctcgttcagccgcaggtaaggctcgcaatcggtggtcacttccagcttttccttcagcagactctggttatcgcagtagctgctctgaaagatctcccggtaggattcgcacacgctctgcaaaagatccatgggcttgcggctgccaagctccagtttgcgggtattgatggaaagatagtagttggtgctgatatactcgctgccattggcgctgccggtgccttccgggctgagatagagacactccgccagctgagatgcagtcaggctgtcctgcaagcccacccgccggatggcgcgttccatcacctcgtccgaaacgatctcgtaggcgttgaagcgggtcttgttggggttcatgccaagcgccgcctcggagtaattgaaggagatgctggcagtggcgctgtccgcacttttgaaatagtgaaccagcccgaacagacagcacaaggtcagcaggcagaaaaacagacggtatttattgatccagatatggcgcagcgcctgtttgatcttttctttaatgtcatccatggcattctacccttttgcagcggcctgcacgcgcggtgcagactgcttagtcgatgtcaatgaccgaaagctccggcacgttattgatgcggggcacccagctggaatcgcccagtccccggcttacaatgagggtggcgttgttggcaagcccatagctgccaccggcatagtcgggcagaaagccctcctcggcgctataaagcgggccgatctttggcagccgcacgatgccgccgtgggtgtgcccggccagacccagttcaaaggaataattttccagatgctcaggaaagtaggtgggaacgtgtgccagacagatgcgcagatcgtagtctgtctgcggctccacgctgtccataaaggtgcttgctccgtaattataaaagtcctccgggctgccctccacacccagaatgctgatgacattgtcgcggacggtatagcgcgcttcctgattgcgcaggatggtcaccccggcggcggtgaacttttccaccagagcctgatcgccgtccagaaaatacagctcgtcctcatggttgcccagcactccgcacaccggcgcgatctcgctcagctgactgcacagggaaagcatattatcatagctggaaccttcgccgtaggtcacaagatcgccgcccagcaggatcagatccggggcaaggctgtggatatcctgcaccagctcgcagttatcctgcccgtactcccgcagatgtaaatcggtgagaaaaacgacccggcagctctgggtcagcttgcgggaatgcacctgataaaactctgccgtatagtgggtgcggttatagcagatgttctgccacagcgccccgccgatcagagcgagcagagcaataaagatcagcagcgtcagcagcacctgcttccaccgggaagccggcgcctgtgcgcagctgccgctgtgtctgccgttttgcgctgcgccttttccgtgctttgctttgataaaggccacatcctttctgccgggaatggaattgagcggatacaaaaactgatatatgaataaattataacatatttagagtaaaaagcaaagagtgcatctctgccatgagcggatttcacatttgggagtttcccataaaaaagggatgccgcagcgcagcatcccttttttgcatatttgcggatcaatcgtcgtcgctgtccagcttgagcacggcggtaaaagcttcgctcggcagggaaacgctgcccagctgacgcatcttctttttgccttccttctgcttttccagcagcttctttttacgggagatatcgccgccgtaacacttggccagcacgtccttgcgcatggccttgaccgtctcgcgggcaatgatcttgccgccgatggctgcctgcaccgggatctcgaacagattacgcgggatgttgtcccgcagcttttcgcagatgcggcgtcccttggcgtaggcgttgtcccggaacacgatcatggacaatgcgtccacggggtcgccgttcagcaggaagtccagcttgaccagatcgctctcgcggtactccttgaactcgtagtcgtagctggcgtagccccggctgcggctcttgatggcatcaaagaagtcgtacacgatctcgcccagcggcagcgcgtagtgcaggtccacccgcacatcgtccagatacttcatatcgatcagcacgccacgcttgctctggcacagatccatcagaccgcccacatagtcgttgggagtgtacagatgcacatccacaaagggctcttcctgcttgacgatattgctgggatccgggtagctggaggggttgtcgatcatttccactgtgccatcggtcagggtcagacggtagcgcacgctgggggtggtggtgatgatgtccagatcgaactcccgctccagacgctcggtgatgatctccatgtgcagcagacccaagaagccgcagcggaagccaaagcccagcgcggcactggtctccagctcaaaggtcagggaggcgtcgttcagctgcaatttttccagtgcgtccttcaggtcggggtacttggcaccgtcggcgggatagatgccgcagaacaccatgggcttgacctgacggtagccgggcagtgcttctgcggtagggcgctctgccagcgtgacggtatcgcccacgcgggtgtcctgcaccgtcttgatgctggcggtcaggtagcctacctcaccggcctgcagctgggcgcagggggtcagggcggtggcgcccatgtgacccacctccaccagcgtgaactctgcgccggtagccatcatgcggatggtgtcgccgggcttcactgtgccctcgaacacgcggatgtagacgatgacgcccttgtagctgtcgtagatgctgtcgaagatcagcgccttgagaggtgcgtccgggtctccggtgggtgcggggatatcgctgactacacgctccagcacctgatcgatgttcaggccggtcttggcggagacgcggggcgcatccatgcagggcaggccgatcacgtcctccacctcctgcgccacctcgtccgggtgggcgctgggcaggtcgatcttgttcaggatgggcaccagctccagatcgtgctccagtgccatataggtgtttgccagcgtctgcgcttccacgccctgcgtggcgtccaccaccagaatggcgccctcgcaggcggccagactgcggctgacctcataggcaaagtccacatgacccggggtgtcgatcagattgaactcgtaggtcttgccgtcctttgcggtgtagttcatggtcacggcacgcgccttgatggtaatgccgcgctcgcgctcgatatccatgttgtccaggatctggtcttccatagtgcgctcgtccacactcttggtcagttccagaatgcggtcggacagggtggatttgccgtggtcgatatgtgcaatgatgcagaagttgcggatgttgtctcttgccatgtagttcctccgggcagctttatgcttctaagatccagtcctccacggccacgatctgtccatggtcgcggtagacgcggggcacgcggcgggaaacgccgcacagcacttcgtaggggatggtatcggtcttgcgggcaatggtttctgcggtgtcgctcacggtgccgccccacaggatggcttcatcgtcctcgcgcacctccggcacgtcagtcacgtccaccatcatctgatccatgcacacccgccccagcaccgggcaggccttgccgtggatctccaccacgcccttgccgcagctcaaaagccgggggtaaccgtcggcatagccggtgcaaagggtggctaccttggtgggcttttcggcggtaaagcggcggccgtagctggcgcactggccgggctgcatctccttgatcatgctcaccacggtcttgagggtcatcaccggcttaaagcgcccaaagcgcacctcgtcgctggggtcgtagccgtacaggatgatgccggggcgcgccatacagcgctcccggggcagtccctccggccagtccgggtgcagcatgaccccggcagagttatcgcagtgcacaagggcaggctcccgcccggcagccttcagcgcgtggaaggctttcacgaacagtgcgtgctgctcggcagtataggccacattctccggggcagtgtcatcggccacggaaaaatgctggaacaggccggtcatttccagcccgggcagcgcacaggcttccagcatctcccggatggcggcgtcaaaatcggtgcgcagggcaaagccgatgcgccccataccggtgtcggccttgaggtggatgtgcaccctgccgcctgccgccacggcggcttcgctcagggcgcgtgcctgcgcaagggagtagcaggccacggtgatgtcattctggatcagggcggcggcgtaggcgggctgcacgtgtcccagaatgaggatgggcaaagtctgccctgccttgcgcagctgcacagcttcggtcaggcagctgaccgccagccatgcggcgccctcctcggcgaacacccgggcgcactgtaccgcgccgtggccgtagctgtccgccttgaccactgcgcacaggggcagcgcccctgcccgggcctttacctcccggaaattataccgaagggcctcgagatcgatctcggcccagacgtgtttttcaaacggttgtttctgcatgatctgtttccttttttggtacgataaagctgccccggcccgtgtggacgggacgccagccgtcaatgccgctctcctgcaaggcatggagggtcttttggcggaaggcgtggtcggtgcggcagcgctcctgcacaaattctttggtctgttcccgcacggtaacgccgtcggcggggcagcggctcttcacgatgggcaaacccgcctcccgcacagcgcactgcacctcgtattcggttgccagcagcatggggcgaatgagggtgagatcccgctgggagaggtaggtcaccggcgagaagcagccgatgcgtccctcccgccagaggttcatataaaaggtctccacggcatcgtccagatgatgtcccagcgccaccttgttgcagcccagctcctgcgcggcggtgtgcagcgcaccccgccgcagcttggcgcacagggcgcaggggttcttctccttgcggtactcgaacaccaccgggccgatctcggtgcggcgcacctcgtaggggatgccgtgctgccggaacagctctgccagcgcggagtagtccatgggctgatggtcgaactgcgggtccagcgtgaccgccaccacctcgtaatcgaagccgatgtacttgcgcagcatggaaaggccaatggtcagcgccacgctgtccttgccgccggaaacgcccaccattacccggtcgccgggggcgatcatttcatagtcctgcacggccttgcgcatcaggccgcaaagccgctgcattgcacgaagatcactcatgacaggctcacactttctaccagattgaccacatcgctgatggacgccagctttgtcagcgccgagacatagaccacatcgccgctgtcgtaggtgatggtcgccagcacggcgtagtaggtgcggatatcgcagcgcaccgcctctaccgtcgcgccctccacggtcaggttgaccttgcggggcttgatgacgccgtaggcctgcttgaggtcggcttccgaatcctcaataaagttgtcgtagctgtcggcggtgccgcgctgcagcagcacggcctgataatcctcgctgtctgccgtgtccgcagtagccagttccagcacggtgccgagggttgcgtcctcggtcatgcggcacacgctccacacgctgctgtcgtagtagacagagacaccgttcgtgccggtatagtgggtgtcaggtgtcgcgggggtctgccggttcaccagcagggtaagcaccatgtaggctgcgatgcccagacagatgaaaatggccatcgccgtcagcagcttggagctgcggcgctgcgccgaggaagtgcggtcgatctcatttggcatggatgtattctccttgtgttggcaaggcggcggtacgccgcccatatcctttatagtataccacaaccgcagcgggatttgtagcgggcaaatggcaaaaatatgccggggcgggcaaaaaacttttgcaaaaatcgaaattcagaaatcaagaggattcaagagaaaacaagtgattttgagagtttcgaaaaattccgctgaaaaaatccaaaaatcatgttgacaggcgcgtttttgtgttgtatactgacactcgcgccccaaaaggacgcctgaaacgtacaaaaagcttatcaggaggaaatagatatgagcactactctcgtaaagcccgctgaagtcgagcgtaagtggtacctgctcgacgctgccggcaagagcctgggccacgtcgctgctgaggccgctgttctgctgcgcggcaagcagaaggtcgattacacccccaacgttgactgcggcgatttcgtggttgtcatcaactgcgacaaggctgttctgaccggcaagaaggccgagcagaagttccacatcacccacagcaagtacatcggcggcctgaagaaggtccagtacagcaagctgatggctgagaacagcgatctggctatgacctacgctgtcaagggcatgatcccttccaacaccatcggtgctaaggctctgacccgcctgcactgctaccagggtgccgagcacgctcacgctgctcagaagcccgagaagatcgagttctaagaaggaggcaatcgaatatgtacgaaaccaaaccttatttctacggcactggtcgtcgtaaggattccgttgcccgcgttcgcgtttacaccggcaccggtaagatcaccatcaacgatcgtgatatcgacaactacttcggtctggagaccctgaagctgatcgtccgctctccgctggtcctgctgggcctggagggcaagtacgacgtcgtcgtccgcgtttccggcggcggtgtttccggtcaggctggcgctatccgtcacggcctgagccgcgccctgctgcagcagagcgacgagaaccgtcctgtgctgaagaaggctggcttcctgacccgcgatcctcgtatgaaggagcgtaagaagtacggtctgaaggctgcacgtcgtgcaccccagttctccaagcgctgatttttttcagtatgcacttttacggctctgcttcggcagagccgttttttgctgcccctttcccggagaactggggagcacgactgcgcatctccggcggttgccccgcaaggggcgagccggaggcgcttataaatccttgctcaagcatcgcgtgcagggcgcagccctgccagcgatgctccccagttctccaagcgctgatttatctcagtatgcacttttacggctctgcttcggcagagccgttttttgttggctgtatcttgcaacagtagagcccctgcacagcaatctgtgcaggggctctctcgcttttcacttctccttccgcagcttttccagatagccgtcggcctcaatggcctccggggtgaaggagttattcttccaccagcccgcaagggcggcggccacggtcagaccggtggtcaccagctgctccacggtggagctctcaatgggcagcataggttttccgcaggcgctcagcacctgattggtcagtgccagcgccagcgcagccgtgcgcgccagcgtggcggcagaaattttgcaatgggtatcgttcatagcttcagttcctctctttctccagatctgcgatgcggtggttcgccaccttcatctgttcttctaaaatgggtacgcggcgggcaaagttgttatgctcccgcacctcccgggtcagctcctccagcttggtgtcggtcaccgcctgacttttgccgttggcgatcagcacaccgatcagggtcactgcaccggcaaggatggccgagatgatgctctccatcgcgctcaccccctccaccgggctttttctgcccgggtgtccacgtgcacccagccggcggctctgcccgcctttgccgggtatcttcccacgccgccgcagccgtgcagcaggcgctcggcacaggcggctacctcctctacgcttgcgccctgcacccggatatctgccgcccgtccgtacagatgctggctgaacctcgtcccgcccgctttggcgttgtgcgccggggtgcggtagccgctggtaatggtcaccgccttgccaaaatgcgcccgcagctgctccagaagttccaccagcgctgtgtcaacgaaaaccgggtcgctgccgtctttacagcggaactcctgcaccctgaaatggggcgagaggtacgcttcgccgtcccgggcaagagagtatgcctgcaatgccattgtgtccccccttacagccgcttcagcagcgcagcgatgggctccatgtaaaaccgctcgtagccggccttgttggggtgtgtgccatcaagcgtgtacttgtcgctcagctcgctgacgccgtgggcacccatgggcggggcgcattcctcaatatccacatagggcacgccccactttttaagcgccgaaaggatcgcgggcttgtaggtcttgtaccagttttcgctgctggcaaacagtccgccgtgcgggaacacataggccacacgcttatcactgcgttttttggccagatagtccagcatcgcttccagcgtaccgatcgtgtcccccatatagaacgccggatcaaagcttccgttcagcgtgcctagcttggcattgttccatgcatcattcacgccgccctccagcaggatgtagtctgccttttccagctccgtagagcttttcacggtcatgccgatgctggtgcggtaaccgccgttcacattgtcagggaccagtgtcgccagcgttgcaccgtccaccgcttcgttgatcagctgcattccgtaccggtctgcaatgcacttgccgtagccgcccgcgctgcccttgccataggcgatgctgtcgcctgcaacgtacagtgtttttcctgccagcgggtcaatgatctgaccgttgatgtcgtatatctccatcttaccaccccttattgatatatgcttttatccggttatcactcagcaggcccttgtacaccttgcactgatacagtgtgcccggccagaactgctgctttttgctgccgtccgcactctgtgccgcaccgatcaggaaggtctggggcacatcggtgatcgtgccgttgctggtcagccattcagtcatcgggcagtaggtgctgccgccgcggtactttttaccgtcaagctgcaccacataccgcgtgcgggtcttgaggtgctcgatgctgtccgacagggtaacgccgccgtagttgtagtaggcgaactccgtcttattattcagcggactgctggtggagttgaagccgggcaggttggcggtgctgccggtctcggtcaggcagtgcaggaaggctggccatgtgcttgcatcaaagttgtcccccgcctttgcgtccaccagaatggtgtactgcggcgactcggtggaagcgtgctccagcagcttcagaccggtgtcaaagccgctgatcagctccgtttcggcgggcagggtgtagatcagctgtgctgtctccgcctgcgcaatattcaccgtgcagctggcgctcttgccgcctgccgtagctgtcaccgtgcagatgccggccttcacggcagtcaccgtgccgcctgccaccgtagcaaggccggcgggcgaaacgctccaccacaccaatttgttggtagcgttcgcgggcagcaccatggcggtcagggtctggctctcgccctcgctcaggttcaggatcgcggcgctcaggctcacgctctgcaccggaatgtcctgtgcactgccgccccactctgcgcgcagggcattcagggcagactgtgcatcgccggtcttgtaggccgcgttttcaaacagggtcagcagcagttcctttgcacctgcggtaaagccgccggctgctgcaatgccctcctccatgtggttcaggtgggcagccgtcagggtctggccgtccacaaagttttgtttttcgtagctcattcgttcctccctaagctcatttttccaaggatcgcccgtcccagcacggcaaaaacgttctccttcggcggctgcggggcgctccacagcgcttccagacgggcataggccgtcatggctgcgtcattgcccgccgccagaagccgcagcactgccagcagcgcctgtttttcctctgcggaaatgccgcccgcgcccagcagccttaccagcgcctcccatgcagaggtagccggtgcgggcagtgcaccctctgccgtgccgctgttggcacacactttgcaccgcacatcggcgctggtcacggtgcggctgccgtccgacccctcaaaggtgatgcagcccgcaccgggcacagccgtcaccgccgccggaacctccagaacgccgttttccacaagctgggctgcacttgcaccgggggtgtgccaatgggcgcacacggtcagtcccttccactcgccccgctgctcgatacgcagccggtagttgccccggttgcccgcataccccagcagcagctgcccgccgggcacggctgctgcgccgtttttgtccagccggatggtcatctcgttcatgccgcaccacccttacacatactggtagccctctacgttaaagggatactcaaagctgagactcgtgtccgttctcacaacgcctatgctcagcacgccgctgtctgcaaagctgatccttacaggcgctgcgccgctgcacttgacgccgttgctcagatcagagcttgtgccgcccaccatggccaccgctgtgccgccccgcacgatgcgggtgctgccgtagtccgcagcagcggcgaccgggtttgcgtcgttttctgccgtgggtgccaccatccgcaccacaatgtaattcaccgtgcccggcacggtcaggctcgtggcagatttgcccgcaacgcctgcgccggtgtagaccagttttccatccatattcatcatcctttccagtcgttccagtttttctgtcaggctaaagcccagtaccgcgttcaggttttctctggtcacctccaatgttccgtctgcgcccacagtcactccccgcccggcctttacgccgcccagcacggcggcggtggcacacggcagcgtgtaggccgtgccgaatttccggtcagcttcggccttggagtagaaccggtcatctgcgcccagctgcagcagcgctgccgccttttcctgcgccgaccagcccgccgccccggcggcgctggtcagcgctttttttacgccgtagggcagcagcgccggggtcaggggcgcataggcttcggtcatgcggttcagctgtgccgctgtggcgggcacggtggtcagggtggcgtctgcccgcaccgcaacaccgtactgcccgtctgcacgcactgcgccggacgtttccgctgtgggcacggtctcgctgcgcacataggggcgcagatccggcagcggggtcgtgtccgtctgcaccgcaccggtggcactattcacgctgaggatgcgcaccaccgcgccgggcaaaggctgtgccgggcgcggcaccgccgccacatcctgtgcggtcagccgcaccgcgccgcccttgccgttcacgctcagcacccgtccatcggcaggggcatagttctcggcccgcagcgcagcggcctccgcccgctttgcgcaggcgtcggcatcggtgcggtcggcaaggatcttgtccgcagccttttgcgccagcgccgcctgcacggccgtgtctgccgcaccgttctcggcgcggcgggcgctctccgctgcggcgcgggcgctttccagcacgcgcgccacgaactgctcgtacaccgagggcggcagctcctcactgccgccgtccgtgggcagggtggcgtacacgtcgtagctgccggggcgggtgtaggcggtgtagccgccgctgcccatggcggccagcatccactgcccccgcacactgccggtcaggcggcggtccaccgtcacgctgccgtcggtgtccagcggaatggcggccagctgcaccccgtcgctgcggcgcaggtacagcgccagcgtgcactccgcccacgctgcgggcaggatgaactgcagccggtccacaccctcggcgttctgtgcgccaaggtgcagccggtgcgggctgggcacaaattcggtgccgccgcactgctgttcaaggatctcgatctccatgcaaaacctccttttctgtttgctgtcccgattgtaccgccgggggcgcaaaactatccagtgtgtacagaaaatgtgaaattttctgttcttcggcattttgctaaacggggtttctgccccgcagaggcaggccgttttcccctgccggagcagggtaattcccccgcaggttttccatgcaaaacccgcgatgtggggcagcttgttttgggtgcagcggcagtatctgcggccttatttgcagaaaaaaaaaccggtgcaaatgttaaaaattcatgaacaaatcatgcgcagaaaaaaggcaaaaatcagaaggaaaccacctaaaaaccaaaatataaaagaaaacactgtgaaaattgcacaaaaaactatgttacaaatctaacaaaatgcgagacacagatttgacagatgctttacggtctggtaaaataccgtttgtgcaacgaacgttgcagcgtttaaattctatctggatgaagtaaaaagccgtcctgcgtacggcacggcatgggcagatgcggcccgtgccggggcagttttgtggtctgcccaaagcggattccaacctgtaatacgatgcttcttcttttacccaaagagagcatcgtatttgactgtgcggcgcttatatccccagccgccgcagtccgggcggtcggggtgccgatgcaatacccgcggccgcaccaaatacgacaaagagaggagttgtctcgtatcgcttccgttaaattgaagaaagcagttactgccgcaaagcaggcagtatctccccgtgtgctggcattttgtgtcatggtggtatgccttgtggctacccttggcgtcaccgctgcaaatctgcggctgacctacgtcaccgactccaatggtgcgcggcaggttcttgtgaccgatgccgctgcttcccccgcacaggtcatgcacctttccggcatccgctctgaagagggcgatgaggtctactacaccgcgttcagcggcaatcttgcatccctgaatatcgagcgcgcattctccgtcagcatcaccgccgacgggcaggagtacccggtcaagctggtgtacggcaccgtagccgatgcgctggagcgcgccggcatcacccttgaaggggacgactacaccgagccggcgctggatcacatcgtgacagccggcagcaagatcgtggtccaccgcgtggactacgaagagcgtgtggagacgcaggctatcccctacgacacccagtatgtctacaccagcctgtacttccgcaacaccggccgcaccactactatgcagcacggcgcagccggtcagcagaccgtgaccacccgcgaccgctatgtggacggtgagctggagaacagcaccgttgtggataccaccaccacggtggagcccaccgaccacgtcatcaagacctacggcgcaggcgcaccggtgtcccccctgaccggcgcggacggcaccaccaacgctcccacctcttatagcaaggtgctcaccggcaaggccaccggctactattcccgtggcggcaagggctcttccggtctgggactgggctacggcaccgtggctgtggatccggacgtgatcccctacggcaccaagctctacatcacttccaccgacggcaagttcgtctacggctacgccgtagccaccgataccggcatcgccgtccagaaagggcagatccttgtagacctgttctacgagacctacgccgaaagcgttatcaacggcgccattcaggtcaacgtctacgttgtgggctgagccgtaaacaaaacacaataaccacgcaaagagaccgctgtacaaactgtgcagcggtctcttttgatgtgagcggaagaacttttttatttcggagcaccggagcgtctgcggacgttccggtgctcctttttcacaggaagagaccctagccgaaactctttcttcttttttcgcaacgctttcgccggaaccgtttgtcaaatgagcagtttacacgatgtcgagctgcaaattttggatggtatgcccacaacatacagagaatgccagaaaatttgtgttaattgtatttgattttcggacaaaaagtcttgcaaaaatggtaaaaaccttttaatataaaagagtacaaagctgcgaaagccgctttcggcttccgcacggggaggagcagtctatgaaaccgaccgaagaaaagattcagagcaatacatcggatctgccggtgtacctgttcaagcagggcaataactgcgaggcttaccgctacttcggcgcacatctggaaacacgggtcggggagtccggcgttgtgttccgtgtatgggcaccgcacgccgcagccatcagcgttgtgggcgacttcaacagctggaagcccggcagccatcccatgcgcaaggtggatggcgattccgtgtgggaattgttcattcccggcatgaaggaatacgatgtttataaatattgtgtgaccacccgcgcaggcgaccttgtctacaaggccgatccttacgctttccacgccgagacccgtccgtccaacggcagcaaggtctacgacctgtccggctttgtatggcacgacgccgcatggcaggccgcacagaaaaaggcggatgtgatcaacggcccgatgaatatctacgagatgcacgccggcagctggaagctgaaggagggcggcaagccctacaactactccgagctggcggacgagctgatcccgtacatcaaggatatgggctacacccatgtagagctgctgccggtgatggaatatccgtttgacggcagctggggctatcaggtcaccggctattttgctcccaccagccgctacggcacccccaaggattttatggcctttgtggataagatgcacaccgcaggcatcggcgtcatcatggactgggtgcccgcccacttccccaaggatcagttcggactgtacaattttgacggcgaggcctgctacgaggaccccaaccccaagcgcggtgagcacaaggagtggggcaccatggtgttcgactttggccgcaacgaggtacagagcttcctcatttccagcgcactgtactggctggagcagtaccacattgatggtctgcgggtagacgccgtggcttccatgctctatctggactacaaccgcaagcagggcgaatgggagcccaataaggacggcggcaaggagaaccttgaagccatcgccttcctgcgcaagctgaacaacaccgtgctgggccgtcacccccacaagtacatgatcgccgaggagtctaccgcgtggcccatggtcacaaagcccgcttcggacgggggtttaggcttcaacttcaagtggaacatgggctggatgaacgatatgctcagctacatgaagaccgacccgctgttccgcgccggcaaccacaacaaggtgactttcagcttcttctacgctttcagcgagaacttcgtcctgcccatcagccacgatgaagtagtgcacggcaagggcagcctgctgaacaagatgcccggcgagtacgacgacaagtttgccaatctgcgcaccttcttcggctacatgatggcgcacccgggcaagaaactgctgttcatgggccaggagttcggccagtttgccgagtggaacgagacaaagcagctggactggatgctgctggactacgacaagcacgccgagctgcagaactacgtccgcaccctgaacgccttctataaagagcaccccgccctctggcagatcgattacagctgggagggcttccagtggatcgtgccggacgactcgcagcagagcgtcatcgccttcctgcgcaaggacgccgccggtaagcagatccttgtcatctgcaacttcaaccccgtcctgcgcgagggctacaccctcggtgcaccggtgtccggcacctacaaggagatcctgaacagcgacgatgccgctttcggcggctccggcactgttcacaacaagccggtgcgcacccacaaaaagccgcagcacggctttgagcagagcatcaccgttaccctgccgcccatgagcaccctgtactttgaggtgcccacaaagcgcacccgcaaggcagcagaggacagcacggacaaaccggcaaaaaagaccgccaaaaaatccaccgtcaagggcgccgtggaaaaggcggtaaaaaagacgacccgcaaggccaaagccgagccggacgccgacaagccggtaaaaaagacccgcaccaccaaggccaaggccgccgaaacggcggatgaaaaaccggaaaaagcaaaaaagaccgctgccaagtccaaagcaaagcccgagacggcagcggaaaagccggtaaagaaaaccgccgccaaggcaaagaccgcggcaaaagcaaagcctgagaccgaagcagaaaccaaacccgcaaagcgcacccgcaaagcaaaagcactcaaggagtaaggatgcccacacggatgcacgcacgaacattctgatctgttgactatcatttccaaaaaggaaatgctaaaggggagaataaagctatggcaaaagaaatcgtggcaatgatccttgccggtggacgtggctcgcgcttatacgcgctgacacaaaagacggcaaaacctgcggtgtccttcggcggtaagtaccgcatcgtggacttcccgctgtccaactgcgtcaactccgatatcgacacggtcggtatcgcaacgcagtaccagccccagaagctgaacgagtacatcggtaacggtcagccttgggatctggaccgtctgcacggcggtgtgcacaccctgcccccttacgagcaggcaaacggcaccgactggtacaagggcactgcaaacgccatctaccagaacatcggcttcatcgacagctatgatcccgagtacgtcatcatcctgtccggcgaccagatctgcaagcaggactacgccgacttcctgcgcttccacaaggaaaagggcgcagagttctctgtggccgttatggaagtggactggaaggaagcttcccgctttggcctgatggtggcggacgagaccgaccgcatcaccgagttccaggagaagcccccggtgcccaagtccaatctggcatccatgggcatctacatcttcaactgggatgtgctcaagaagtatctgatcgaggacgaggctgaccccaactccaagaatgacttcggcatgaacatcatccccgccctgctgcgtgacggccgcaagatgtacgcctaccgctttgccggttactggcgcgacgtgggcaccatcgacagcctgtgggaagccaacatggaagtgctggaccccgagaactccggcattgatatctttgataagacctggaaaatttacagccgcaaccccgtgctgcccgcccaaaagatcggcgagcgcgccgttgtgcaggactccctcatcaccgagggctgcaagatctacggcaacgtcaagcactctgtcctgagcgcaggcgtcgttgtggaagagggcgctaccgttgaggacgccgtgctgatggacggtgtcgtggtcaaggcaggtgccgtggtcaagcgctgcatccttgctgaggacgttgttgtgggcgcaggtgcaaaggtcggcggcgatggcgctattgcccacgttggcaccggtctgaccatcggcgcaggcgctaccgtcaaggagggcgcaaaagtgtttgaatccgtcaaggagggtgtggaagtatgctgagacagaacaccaatgcgttgggtatcattttccccaacagctatgacaataccgttcccgagctggtgaccgagcgcgcaatggcctcgatcccctttgcgggccgttaccgcatggtagactttgtgctgtccagcatggccaactgcggcatttccaacgtttccatcgtggtgcgtaagaactaccactccctgatggatcatctgggcaccggccgcgagtgggatatggcacgccgtcacggcggtctgaacatcgtacctccctttgcagaaaagggcgtgcgcatctactccggccgtgtggaggctctgggctccattctgagcttcctcgagcaccagaaggagaagtatgtggtcatgagcgatgccaacatcgccgtcaactacgacttcaacgccctgctggctgcccatcaggccagcggtgccgacgtgactgtggcttaccagaagaccgagatccccgagggccgcaagaacgacaactacaccctgaccattgattccgatggccgcgtgaccgagctgctgttcaacgactaccgctccggcgtgcagaatctggatctgaacatctatgtgctggaacgcgagaccctgatcaagctggtcaaggacgccaccgcccgcggtctgatctacttcgagcgcgatattctggcacacaacgtcaacatcctgaacatccacgctctggagtacaccggctatgtagctcatgtctgcgacatgaagagctactttgacgagaacctgaagctgatcaaggacgagaatctggaggcactgttccccaagggctgccccatctacaccaagatccgtgacgataaccccacccgttacgtcaccggctccaaggtttcgaattccattctggccgatggctgcgtcatcgagggcaccgtggagaactgcgtgctcttccgcggcgtcaaggtcaagaagggtgctgtggtcaagaactgcgtcctgatgcaggataccgtggtcgagcccaacgtggagctggactgcgttgtcaccgataagaacgtgaagatcaccgccggcaaaaagctgtccggcaccgagagcttcccggtctacgtccagaagaaccacaccgtctgatcgatgcaatatccataggggcggcttcctccccggtagcccctcttgagaggggcgggggcacctgtgtgcccccgcctgctcttttgtatgcaaggttcgcgccgcttttcatggcggcggggagcgcgaacatctgtctgtatcatggaaggagcgaatcctatgaagatcctgtatgctgcttcagaagccaatccctttgccaaatccggcggtctggccgatgtggcaggtgccctgcccaaggcgctggtcaaggacggcgtggacgcccgcgtcatcatgcccctgtacggcgatttgaagtaccgcgataagctggaatacgtcaccaactattccgtccctgtgggctggcgcagccagtactgcggcctgttcaaggccgatgtggacggcgtgacctactacttcctcgacaacgaatattacttcaagcgccgcggcctgtacggcttctacgatgacggtgagcgcttcgccttcttctcccgcgccgtgctggagactttgttctacatcgacttcacccctgatatcatcaactgcaacgactggcagaccgctctggtgccggtgtacctgaacctgtactatcgtcatctggacaagttcaaccgcatcaagaccgtgttcaccatccacaacattgcctatcagggcaagtacggcaccgatattctggaagacacctgcggcatcggccaccgggaccagcatatcgtggagtacgacggctgcgccaacttcatgaagggcgctttcgagactgccgacaagatcaccaccgtcagccccacctacgcacaggagatcttggacccgtggttcagctacggtctggacgctctgctgcgtgagaagcaatacaagctgtgcggcatcctgaacggcatcgatatggacgccaacgaccccgccaccgacaagaacatccccttcaattacagcatcaagacctttgagaccggcaaggccaagtgcaaggaagctttgcaggacaggttcggtctgcataaagacggcagccccgtctttggcatggtcagccgcatggttggcatgaagggctttgatctggtgcagagcatcgctgacggtctggtggaccgcggcatccagctggtcattctgggcagcggcgagagccagtacgagaacttcttctccgacctgtgcggccgtcacccgggccgcgtaggcacctacatcggctttgagcccaagctctcgcaggagatctacgccggtgccgacgccttcatcatgccctccaagagcgagccctgcggtctggcacagatggtggcctgccgctacggcacacctcccatcgtccgcgagaccggcggtctgcgcgactccatccacgacagcaccatgggtgacggcaacggctttacctttgccggctacaacgcccacgagctgtatgtggcctgctgcaacgcacaggatgcctacaacaacaaggaaaactggaagaacctcgtgcgtcactgcatggagtgcgatttcagctgggacgtttccgccaagagctacgagggtctgtacaacgagaccgcaaacctctggtaagcacctaaatcccaaagcacccgccggggctgccgcacaaacgtgcggcagccccttttttgcttctttttccgcttttttacattctgcacaaacttttccgcaaagtttgtgcaatgatgtgcccgcaagcgcacaatgtgtgttttcggcgcacatttatggaatcagtcttaacaaactatgaaattttactatatttcggtggagaattgattgcaatatccaacgttttgaagtatactgaggacatagactttttggctgcctgtccatctctggcaagacttccagatactggaacacaggcggcacccgcagaaaggagcggcgcagaacttgaagggctggtataaagctttagaggatctggtctggctgacccagctggggctgaatatgctgctgccgctggtgctctgccttgccgggtgctggtgggctgtggagcactggggctggccggaatggctgtttttgcccgctgtggggctggggcttgccgccggggcgcagaacttctgggtgttctgcaaggaacggctggagcgctccaaacacgaaaaaaatcatcgggtgggctttaactcccaccagtaatggaggtttgcttttatgaaattgcagccggaatccaaaaaggagctgctgcgcatcgcctgcggcgtgtctctgtgcactgccgtgatgtgggtggtgtttgcagcgctgcatctggtgggctgggtagtctttgactaccgggtgctgctgggcggcatcatcggtgcgctggtggctatcggcaactttgccggcatctgcttcgtggtgcagaaggtcattgacgagccggacgaaaaaaagcgtaaagcgcagctgcagatatcctataatacaaggatgctgctgcaggcgttgtggatcattatagccattgcggctccctgtttccaggcgtttgcaggcgttctgccgctgctgttccccagagttacgatctattatctccagataaccgggaagtacaagccgctcacacccccgcaggagccggtggacatcgctgtggaagatgaccccgcccccgccgaggagtctgcggtgcagccccgtgacgaagggggtgaacaagaataaatggaactgaacggcgcaaagatcctgtataccatccacaccaatatccccctgctgggtgattttaaaattacccagaccttggtaaccacttggatcgtcatggcgctgctctcgggttttgccatctggctggggcatgacctcaagctggaaaatgtgtccaaacgacaggccgcagccgagttcatcgtaacacggctggaacagttcgtgcacgacaacatgggcttccacttcgatcagtatatccccctcatcggtgccatctttgcactgagcatcgggtgcaacctgatcagcgtcgtcggcctgtggagccccacagccgacctgaacaccgaagcagcgtgggccatcgtggtgtttgttctgatcatgtactacaaaatcaagacaaacggcattctggcctatatcaaggggctgctcgatccgatctttatcatggcacccatcaatgtgctgtcagagatctctacccctgtcagcatggcgttccgtcacttcggcaacatcctgtccggtacggtcatctccacactgctgtactgggcactggcaagcctgagccacgtcatctttggctggctgccgggcttcctgagtcagatccagctgttccagatcggcatcccggcctttaccggtttgtatttcgactggttcggcggctgcattcaggcgttcatcttctgtaccctgaccgcaatcttcatcaaacgtgctgccggtgaggactaacccttccggcatcccccaaaacacaaacacattttaggaggacaaatcttatgactgatttccagtatctggctcgtggtatcgctctggcaggctgcggcatcggcgcaggctgcgcactgatggcaggtatcggccccggtatcggcgaaggcaacgctgctgccgctgcctgtgaggccgttggccgtcagccggagtgcaagagcgacgttaccagcaccctgatcctcggtgtcgccctttccgagaccaccggtatctacggttttgtcaccggcctgctgctgatcttcctggctcccggtatgttcatgaagtatctggcataagcctcccgatccgaaaaaataacgaaaggagacgcttatggaactgtatcaggcgttgatcacgctggatggctggacctttctggcccagatctgcaacctgatgatccagctggtcatcttcaaaaagttcctgctgaagccgatcaaacaggtgatcgccgaccgcaaggccaaggccgacagcgagatcgcagatgcacagaagctgcgcaccgaggccgaagccatgaaggcggagtacgagcagaacctgcagaacgcccgcactgaggccaaccagatcgtggctgcggcgcaaaagaccgccaccgcccgctcggaagagatcgtgggcgaggcccgcgcacaggccgctgcgctgaagcagaaggccgaggccgacattgcgcaggagcgcaagaaggccgtgaacgaggtcaaggacgagatcggcggcatcgccatggagatcgcatccaaggtggtggagcgcgagatcagcgagaaggaccacaaggacctgatcgacgaatttatcaaaaacgtgggtgaagcatcatgaccgaaactgcaaagatgtacggcggcagtctgtacgatctggcggcagaggaagggctggagacccgcattctgggcgagcttgacgaggtgcaacagcttctgaagcaaaacccggactacctgcggctgctcagcacccccagcatccccaaaaaggagcgctgcggcctgctggacgaagccctgcgcgggcaggtccacctctatgtgctgaactttttaaagatcctgtgcgaaaagggcaccctgcgggagctgtccggctgcgcacgggcctaccgcatccgctacaatcaggcgcacggcattctggaagctacggccatctcggctgtcccgctgacagagcagcagcgcgcggcgctgcacgccaagctggaaagcctgaccggcaagaccatcgaccttaaaaccaaggtggatgccaaggtgctgggcggtatccggctggatatcgagggcaccgagctggacggcaccgtccagaaccgtcttgcttccctgcgccgggatattgcggcggtcactttgtaactttttccctgccctttacaaacggggcagagcacagaacgaatttccacccgaaatgactattatgaattgagtggtgaacaaacaaagatgcaactgaaacctgaagagatctccaagatcatccgtgcgcagatcaagcattacgaaaatgccatcgagcagagcgagaccggcacggtcattatggtgggcgatggcatcgcccgggccagcggtctggaaaagtgcatggcaggcgagctgctccagtttgacaacggcgaatacggtatggcccagaaccttgaggaaaataccgtttccatcgtgctgctgggctcggatgccggcatcaaagaaggcagcatcgtcaagcgcaccggcaaggtagtctccgtgccggtgggcgatgccatgatcggccgcgtggtcaacgcactgggtcagcccatcgacggtgcaggccccattgagaccaccgaataccgcgccatcgagagccgcgcgcccggcatcatcgagcgccagcccgtcaaggagccgctgcagaccggtatcaaggccatcgactccatgatccccatcggacgcggtcagcgcgagctgatcatcggtgaccgccagaccggcaagaccaccatcgcttccgataccatcatcaaccagaagggcaaggacgtcatctgcatttacgttgccatcggtcagaagcgctctaccgtggcaaaccttgtgcagagcctgaccgaagccggtgccatgggctacaccatcgtggtgtccgctaccgcatccgagctgtcccccctgcagtatatcgccccctactccggctgcgccatgggcgaatacttcatgcagcagggcaagcacgtcctcatcatctacgatgacctttccaagcacgctgttgcctaccgtgccctgtcgctgctgatccgccgtcctccgggacgcgaggcttaccccggcgacgttttctatctgcactcccgtctgctggagcgcgccgcaaagctttccaacgagctgggcggcggcagcctgacggctctgcccattatcgagacgcaggcgggcgatgtttccgcctacattcccaccaacgtcatctccatcaccgatggtcagatcttcctggagaccgagctgttccactccggcgtcatgccggcagtcaaccccggtatctcggtgtcccgtgtcggcggcaacgctcagatcaaggccatgaagaaggtggcaggcaccctgaagctgatctactcccagtaccgcgaactgcaatcctttgcacagttcggctctgatctggacgccgacaccaaggcgcgtctggcacagggcgagcgcatcgtggaggtgctcaagcagaaccgctccgcgcccgtacctgtggaaaagcaggtggctattctgtacgccaccatccatgactaccttgtcaacgtcaaggtggcggacgtggcagagtacgagaagagcctgtacgagtatctggacaacgatgccgccggggctgccgtgatggacaccatccgcaccaccggcaatctggataaggacaccgaggagcagctcaagaccgtgctgacccggtataccgaaagctttgtcaaggcgcattaaagggaaggaggcgtaacgcatggctggttccatgaaggacatcaagctgcgcatcaaaagcgtagagagcaccatgcagatcaccaaggccatggagctggtggcttcctccaaaatgcgccgtgccaaggagcgggtcgagcacagccgaccctattttgaaacgctgtacaagaccctgaccgagatcgcggcagcggacccccgggcccgcaacccctacctgcgccgcagcgagatcaagcgcacgctgctggtggtcattgccggtgaccgcggccttgccggcggttacaacgccaatgtgctcaagctggccgcacaggaaagcggcaacgtggaggtgctgcccatcggcaagcgctcggcagaatattttgtccaccacgaagccgacctgttcacgcaggaggtgctgctggccgccgatatttcggtggggcagtgcttccagctggcgcgccagatcaccgaagggtaccgcaagggcgagtttgacgccgtaaagctttgctacacccggttcgattccatgatgacccagacggctgtctccattgaggtgctgccgctggccatggagcccaccgagcagcagaaagcggaggcacgccgcagtcagatcttgtacaaacccagcagcgaggaagtattcagcgcgatcatcccggagtatgtggcgggtgtcgtctacggtgccgtgtgcgagagcgtagccagcgagctggctgcccgccgcaccgccatggacgctgccaccaagaacgccggagagatgatcgaccatctcaacctgtattataaccgtgcccgtcaggctgccatcacgcaggagatcaccgagatcgtggccggcgcggagaactaagactatcaagaaggagttgtagcctatgtccgaaaaacatatcggcaaggtgatccaggtcattggcccggtgctggacatccagttcaaggatggcgagctgccggagctgctcaacgccattgagatcgacaaccacggccagaagctggtggtggaggttgctcagctgaccggcgacaatgtggcacgctgcattgccatgagcagcaccgatggtctggtgcgcggcacagatgccgtggacaccggcgagtccatcaaggtgcccgtaggcgaccagtgtctggggcgcgtgttcaacctgctgggcgagcctgtggataacaagcccgcccccaccccggatgcctactggcccatccaccgtcccgctcccagctacgaggagcagcagtccaccaccgagatcctggagaccggcatcaaggtcgtggacctgatctgcccctacgccaagggcggcaagatcggcctgttcggcggtgccggtgtcggcaagaccgttctgatccaggagctgatctataacatcgccaccgagcacaacggttactcggtatttaccggcgttggcgagcgcacccgtgagggcaacgacctgtacggcgaaatgaccgagagcggcgttatcaacaagaccgcgctggtctacggccagatgaacgagcccccgggagcccgtatgcgcgtggcactgtccggcctgaccatggcggagtacttccgcgatgtgaaaaatcaggacgtgctgctgttcattgataacatcttccgcttcacgcaggccggctccgaggtgtccgcactgctgggccgtatgccctctgccgttggttaccagcccacgctggccaccgagatgggcgctctgcaggagcgcatcacctccacccgcaagggctccatcacctcggtgcaggccgtctacgtgcccgccgacgacctgaccgaccccgcccctgccaccacctttacccatctggatgccaccacggttctgagccgtgacattgcatcgcagggcatctaccccgctgtggacccgctggattccaccagccgcatcctcagcccggaggtcgtgggtcaggagcactacgagatcgcccgtgccgtccagaaggtgctgcagcgctacaaggaactgcaggacatcattgccatcatgggcatggacgaactgagcgaggaggacaagcgtaccgtcagccgcgcccgcaaggtgcagcgcttcctgagccagagcttccatgtggcagagcagttcaccggtatgcccggtcagtatgtgccgctgaaggagaccctgcggggcttcaagatgatcctgagcggcgagtgcgacgagctgcccgagagcgcattcctgttcgcgggcaccatcgacgacgtgttcgcaaaagcgaagaaggggtaagccatgacgacctttcatctgacggtggtcacgccggacggctgcgcctttgaaggtcaggccgagcgcatcgtctgccgcgccattgacggcgatatcgccattctggcaaagcacggcgattactgcacggcactgggtatgggcgaggcgcacattgtagatgccgacggtcagcgccgccgtgcagcctgcatgggcggcctgctcagcgtgctggacggggacgtgcgtctggtggctaccacttgggaatgggcggaggacatcgatcaggcgcgtgcggaagcttccaagaagcgcgccgaggagatccttgcccgcaagaacctgaatgaccgtgagtacgagctggcacaggcgcgcctgaaacgcgcgctagtgcgcacctctatccgttaaaccctgtatgcaaaaaggcacccgcagccgactggctgtgggtgctttttttgcgcggaacaatttcaaatgcgctccgcaggagaagttactacctgccgtcagcgtgcagggacgctccgctgggccagaggcagggaggggtgttccgactcccccctccctacctctggactccacccaccccgcaacgggccaagggctgctcgcccttgacaaacctaaagaagaagtcgaagcacaaaaaagctagcgctgcgccagtcggcgctatcgctttaacgcttttttcgcttctccattaaaagcccctcagtcgctgcgcgacagctccccccgagggagcgagcgcttgcccgcagcgccgcgctttcgcagaaagcggcgctgcaaatgccgttttcctctacgaccccacctgtggaaatggggttctgaaaagcccgcaggcttttcagaaccccaaaattaaaaatattctttccgctgaacatggctagagcgcagcggaagccattctaaatcgtcttacccccggttcgccttctcgatcagggtgcggatgtggtgcgccagcatctccacggcggtgctgttctcgccgccgttgggcacaatgatgtccgcgttgcgcttgctgggctctacaaaggcttcgtgcatcggcttgaccgtggtaaggtactggtcgatcacgctgtccaggctgcgcccgcgctcctttacgtcccgcagaatgcgccgcaggatgcgctcgtccgcgtccgtgtccacaaagatcttgtagtcgaacagggcgcacagctccggctctacaaagggcagaatgccctccacgatcagcaccggggcgggctcgatgtgctgcacctcgttgctgcggttgtggttggagtaatcgtacaccgggcagtcgatggcgcgtccggccttcagttcctgcaaatggtagatgagcagggcgttgtcgaaggcgtccgggtgatcgtaattcagcttgcagcgctcttcaaagggcagctcatcgtggcgcttgtagtagctgtcgtgggagatcagccgcacctcatcctctccaaagcgctccttcagccgcagcgcaagggtggtcttgccgctgcccgagccgcccgcgatgccaatgatcaggttgttcatgatgcaaactccttctgtacaaaatctgccggtttctgtggaaaaaccggtcggaatggattataatagatttgtatatattctgctgccccggggctgttgccgcccggcagcagttcttcccttttatcatagcacaaaatgtgtcatttggacagggcttgcaggctatcctccgacacattccaaaaaaggacggtcaaaatgtcaaaagaaacattgcagcacaccatgagaagcaaggtccgggtatttgaggacggcggcatccgtctgctccgtaaaggccagaaagggctcatccatgccatcttcagccgctttgggctggtgctggtactgctggtgctgcagttcggggcgctgttcagcctgatgcgctggttcagtaacctgctgccccactacttgggcggcaccttgctggtcacggcggccatgatggtctacctgctcaatcaggacatgaacaacagcgtgcgcatcccgtggctggtggtcacggcgcttgccccggtgctgggcgtgctgctgttctgctacacgaaagaggatgtcggtcaccggatgctcaaaaagcgcctgctggagctggaggggcagacccgcagccagcttgcgcaggaccaaaaggcaagcacaacgctggacgcagactgccccggcgcagcctctctggcgcagtacctgcgcggacggggcggcggcttcccggtgtacgaaaacacgcaggtgacctatttccccagcggagaagccaagtttgctgcgctgctgccccagctggaaagcgccacccagtacatttttctggaatacttcatcatcgacgagggtctgatgtgggggcgcattctggaaattctggcacgcaaggccgcgcagggcgtggatgtgcgggtgatgtatgacggcacctgcgagttctccaccctgccccgggactaccccaaacggctggaagcgctgggtatccgctgcaaggtgtttgcgccggtcacgccctttgtttccacccactacaactaccgcgaccaccgcaagatccttgtcgtggatggccgcgtgggctttaccggcggcgtgaatctggccgacgagtacatcaatcacattgaaaaatatggccgctggaaggacgccgctgtcatgctggagggcgagggcgtgcgcaccatgaccgctctgtttttgcagatgtggagcatccagcgggagccggagtttgcgcagttcctcacccgccccctcccggaaacgcaggccaacggctttgtcatcccctacggcgactgcccgctggatggcgagcgggtgggcgagatggtgtacatcgacctgctcaaccgcgcccggcgcagcgtacatatcatcacgccctaccttattctggacggcgagctggagaccgccctgcgctttgccgcagagcgcggcgtagatgtgcacctgattttacccggcaagccggacaagtggtttgcttatgcgctggctaagacccattacctgccactgctgtcctctggtgtaaagatcagcgagtgggtgcccggcttcacccacgccaaggtgatgatcatggacgggcaggaggcggtcgtgggcaccatcaatctggattaccgcagtctgtaccaccactttgaaaacgcggtctggatgcgcggcgtggactgcctgccccgtattgaagctgattttcaggatacgctggcacagtgccgcacagtagagcctacccgccagagcgtctggcagggcaaaaaactgctgcatctggtgggcatggtactcaagttcatcgccccgctgatctaaacgaaaaaacgccccggaaacgctttcaaacgtttccggggcgttctttgcttatgcttttgcgcctgccggcactttcttttttttcagggtggagggcatcgccttcagcgggtcgcccaccacatgatgatagacctcctcgtaacggtccagcatcacctcgtactcgaaatttgtatggatgtactggatctgctgctgccgcattgcgtccgggtactcctgtgcgcattcccgctccagcgcccgtgcaaggtcgtccgtatcctccggcgtaaaggccgcaccgtaaatgtcggtcacgaccgtattctcggggatatcgctcaccagacaccgtgcaccgatggacagcgcctccaacagagacagggaaagtccctcggtgtggctgggcagaacgaacagtccacagttgctgtaaagctccttcagcgggtcgcccaccacatagcctgtcatgatgatattggggtcattctgcgcctgctgctgtactgtcttacaatattcgctgtcgtccagcgggccgaccagcacaagctttttccctgtcttggccttgcggtagccctccaccagatccatcgtgcccttttccggcgagatgcgtcccacatataggatgtactctccctgctccagcccatatctttcccggatcaggctgcagggacgcttttcataaaatcggatggcattggggatcaaaatggacgcgcggtcatatttctgcaaaaaatagttccattccgtctccgaaagcaccaccagatcatccgcatattttgcggcgatcctctctcccagcttcatgtaacggcttgcaaagccgcgccacttgtctaccttccagttcaaaccgtgcaccgtacatacggtgtgcttgccgaacagtttagcgatcagcagcggtacgctgggtccgatggcgtggtaatggatcacatcgtagccccggaacagcgcgtcaaaggtagccagaaaggagtagatcgtggcattcagcgaaggcttttgcagggtaaatacccgccgtgcgtgaacgccgtccacatcgtacacattatggtgcttttccaagccgcggttatacacggttacgtcatagccgcgttccaccagacttctggccagcccgccgaccatgacctctacaccgcccgagcgacttggaaaatccttgtgcccgatcatcgccaccttcaacgtaactacttccttccgttctgtaatacatctctatcaaatcccatttttcatcacagtatcatattattattgtatcataagcatcccttagctgcaactaattcctataaagtattttaacaaaatatgaattttcagttatatcttgctctatttgtaggcatttcatcttttacatactaaaaaacgcttcaggaaaactcctgaagcgtttctctaagtcggcgactacctattttcacaagccgtttccagctaactatcttcggcacaagtaagcttaacttctgtgttcggaatgggaacaggtggaaccttaccgtcatcgacaccgaccgatttgactgaatcagtataacacatttctgtgcttctgtccagtatttcctgaaggacgtgccttcaaaactgaataatcactgctaacattttttcgttgacttaaaagtctcaagcgaattgtggtcaagccctcgacctattagtacacgcttgctgaatggatcactccacttacacatcgtgcctatcaaccttgtagtcttcaaggggtcttacttgtttgaaacaatgggatatcttatctttgggtcggcttcacgcttagatgctttcagcgtttatccgatccgtacatagttgcccagctatgcccttggcagaacaactggtgcgccagaggtacgtccgctccggtcctctcgtactaggaacagctcccatcaaatatcctgcgcccacgacagatagggaccgaactgtctcacgacgttctgaacccagctcgcgtaccgctttaattggcgaacagccaaacccttgggaccgaatacagccccaggatgcgatgagccgacatcgaggtgccaaacctccccgtcgatgtggactcttgggggagatcagcctgttatccccagggtaacttttatccgttgagcgatggcatttccactcacataccaccggatcactaactccaactttcgttactgctcgacccgtcagtctcgcagttaggctcgcttctgcgtttgcactcttttgcttgatttccgttcaagctgagcgaacctttgaacgcctccgttactctttaggaggcgaccgccccagtcaaactgcccacctaacaatgtcccccgccttgattcaaaggcgcaggttagaattccaatatcgcaaggatggtatcccaacggccactccacaaatgccaaagcacttgtttcccagtgtcccatctatcctgtgcatgcaacatcgaaacccaatattaggctacagtaaagctccatggggtctttccgtcttgtcgcgggtaaccggcatcttcaccggtactacaatttcgccgggcgggctgtcgagacagtgcccaaatcattacgcctttcatgcgggtcagaacttacctgacaaggaatttcgctaccttaggaccgttatagttacggccgccgttcactggggcttcgattcaatgcttgcacatctcctcttaaccttccagcaccgggcaggcgtcagctcgtatacgtcatctttcgatttagcacaaacctgtgtttttggtaaacagttgcttgggccgattctctgcggctccatctctggagcaccccttctcccgaagttacggggtcaatttgccgagttccttaacaacccttctcccgttggccttagaatcttcttcctacctacctgtgtcggtttgcggtacgggcaccgcagaaatacacacagcttttctcgccatcttccatcccggacttcggtactaacttccctcgatcgctaccggaaccaacacccggctccgagacttcaaatgtgtccctgtgtttaactcttttggtggtgacggaatctctaccgtctgtgcatcggctacgccgttaggcctcaccttagctcccgactaacctggagcggacgaaccttcctccagaaacctgaggctttcggccatgcagattctcactgcattcgcgctactcattccggcattctcacttctatacactccacagccgcttgcgctactgtttcaccgcgtatacaacgctcccctacccaatacattgctgtattgcctaagcttcggtgtcaggtttagccccgttaaattctccgcgcaaagacgctcgaccagtgagctattacgcactctttgaatgtgtggctgcttctgagccaacatcctggttgtctacgtatcttcacatcgttttccacttaacctgactttgggaccttagctgtagatctgggctgtttcccttttgacaatgacatttatctgacactgtctgactcccaagcatcaatactctggcattctgagtttgataagcttcgctaacctctcggccgctaggctattcagtgctttacctccaggtatctaacttaaggctagtcctaaaactatttcggggagaaccagctatctccgggttcgattggaatttctccgctacccacagttcatccgccgccttttcaacggaggtcggttcggtcctccatggaattttacttccacttcaacctgaccatgggtaggtcacccggtttcgggcccattgtatgcaacttaacgcccttttcaaactcgctttcgcttcggctccagaccttaagtccttaaccttgctgcatacaatcgctcgccggaccgttctacaaaaagtaccctatcacactttgacgtgctctaggtgcttgtaggcacagggtttcaggttctttttcactcccctcccggggtgcttttcacctttccttcacagtactatacgctatcggtcactgggtagtatttagggttggagggtggtccccccgtattccgaccaggtttcacgtgtctggccgtactctggatcctgcgcagctctctccgttttcacctacgtggttctcacactctctgaccggccttcccatgccgttcggttaacagattaagtcctaaaagcagtccgtaccccggaagtatttctactcccggtttgccctcttccgcgttcgctcgccactacttacggaatctcgtttgatgtctcttcctcgccctacttagatgtttcagttcaggcggttccctcgatatacctatttttaagttcagtataacgtacctgagtatgaacccaggtgagtttcctcattcagaaatctccggatcaatgcttatttgcagctccccgaagcttatcgcagcttatcacgtctttcatcggctcccagtgccaaggcattcgccctgcgcccttgttcgcttgacctttcaaacgttcttttggaacatttggtatcctcttgattctctcttgccaacgaagattattgttacccttccttttgaaattgtaatatttcttaaaaaagaacttactataatctttgtttcgcagttattattcagttttcaaggtacgtcttggtgatgtccctcaaagcccggtctcccggaactctgattttcatcacatggtgggccaaaatggactcgaaccatcgacctcacgattatcagtcgtgtgctctagccagctgagctattggcccatgtggtggagattaagggaatcgaacccttgaccccctgcttgcaaagcaggtgctctcccagctgagctaaacccccacataaggttttgagtaaccccttttcagggccctcaaaatcgaacaatatctactcaaactttaacttgtcacctgttccaatgactgaccatcttagatgctctgtcattgcctgactccttagaaaggaggtgatccagccgcaggttctcctacggctaccttgttacgacttcaccccaatcaccagttttaccttcggcggcgtcctccttgcggttagactaccgacttcgggtccccccggctctcatggtgtgacgggcggtgtgtacaaggcccgggaacgtattcaccgcagcatgctgatctgcgattactagcaattccgacttcgtgcaggcgagttgcagcctgcagtccgaactgggacgttgtttctgagttttgctccacctcgcggtcttgcttctctttgtttaacgccattgtagtacgtgtgtagcccaagtcataaagggcatgatgatttgacgtcatccccaccttcctccgttttgtcaacggcagtctggccagagtcctcttgcgtagtaactgaccataagggttgcgctcgttgcgggacttaacccaacatctcacgacacgagctgacgacaaccatgcaccacctgtctccttgctccgaagagaaatactgtttccagcatcgtcaagggatgtcaagacttggtaaggttcttcgcgttgcgtcgaattaaaccacatactccactgcttgtgcgggcccccgtcaattcctttgagtttcaaccttgcggtcgtactccccaggtggattacttattgtgttaactgcggcactgaaggggtcaatcctccaacacctagtaatcatcgtttacagtgtggactaccagggtatctaatcctgtttgctacccacactttcgagcctcagcgtcagttggtgcccagtaggccgccttcgccactggtgttcctcccgatatctacgcattccaccgctacaccgggaattccgcctacctctgcactactcaagaaaaacagttttgaaagcagttcatgggttgagcccatggatttcacttccaacttgtcttcccgcctgcgctccctttacacccagtaattccggacaacgcttgtgacctacgttttaccgcggctgctggcacgtagttagccgtcacttccttgttgagtaccgtcattatcttcctcaacaacaggagtttacaatccgaagaccttcttcctccacgcggcgtcgctgcatcagggtttcccccattgtgcaatattccccactgctgcctcccgtaggagtctgggccgtgtctcagtcccaatgtggccgttcaacctctcagtccggctaccgatcgtcgccttggtgggccgttacctcaccaactagctaatcggacgcgaggccatctcaaagcggattgctccttttccctctgctcgatgccgagccgtgggcttatgcggtattagcagtcgtttccaactgttgtccccctctttgaggcaggttcctcacgcgttactcacccgttcgccactcgctcgagaaagcaagctctctctcgctcgttcgacttgcatgtgttaggcgcgccgccagcgttcgtcctgagccaggatcaaactctttataaatgatatttatcacttaaaagtgttaaatcttgtttcgctcagcacgcaatcgcttgcgtcctgtgtgaattacttttgtttggaattgtttaccgtgtttttccaacacgaaaataggttccgttacaagttctttcgatattgttcaattttcaaggtcctgtgcgccgcagccttgcggctgacgacttgatcattttaccacagaagtggttttttgtcaagcacttttttgagaagcttttgaacttttctgaacttaaatcgttcagcagtttctcggtgctaaccgtgagcttgtcggggtgaaacccctccatcttgctttcgcaagaccgctctgtttgcttgaacgccccactggggcgattcattgctttcgcaaccgcaaaacttttgaacgttcattggttcttttcaagggcttcctgctgggacttcagaagtcattcttttgtctcagcgcttggcgctcacatatagtaccataccgcaactacttttgcaagccttttttgcatttttttcgcctttttttgcgctttgtgaactatcgccagttttccgccgggaaccgcctggtgttttgacgtctccggcagcggcggtgtctcccgccctatattattacattatataggcagcgtgatgcacaaacgggtatagacagcggcttatattacccgccggaaagcgtactgcgctgtcaagactttccgtgcaaaattttgtcccgaaaaatatctgcgatttttggcgattgctacaaaacgcaaaatatagtggtattttgcttgacttgccactagataatgataaaatagagctacattcagtttgttggatatcattgtgcgcagacgggtatctcttagggtaagggatacccgttcacaatgcgcctatatagaaggaggagaaccgatgaagatcatcaaacgaaacggtgcagaagttccttttgatattaccaagatcatcaccgccgttaccaaagccagtgattctgtgggcggtcaggctcgtctgagccgggagcagatcacccaaatcgccgcagccgttaccgaccagtgccagcagctcaaccgcgcggtcagcgtggaagaagtacaggatctggtggagaaccagctgatggacattcaggcgcacgatgtagcacgccactatatcacctaccgctacgtccagagcctgaagcgccagaccaacaccactgacgagcgcatcctgagcctgatcgagtgccagaacgaagaggtcaagcaggagaacgccaacaagaaccccaccgtcaacagcgtgcagcgcgactatatggccggcgagatctccaaggatctgaccgcccgtctgctgctggacccggagatcgtaaaggcccatcaggagggtctgattcacttccacgattccgactacttcgcccagcatatgcacaactgcgacctggtgaaccttgaggatatgctgcagaacggtaccgttatctccggcacctatattgagaagccgcacagcttctccaccgcctgcaacattgccacccagatcattgcacaggtggcctccaaccagtacggcggccagagcatcagcctgacccatctggctccctttgtggacgtttcccgcaagaagatcgccgctgaggtggagctggagatggaaggtctggacgtctctgccgagcgcaagaaggagatcgtggagcgccgtctgcgcaacgagatcaaccgcggcgtgcagaccatccagtatcaggtggtcaccctgatgaccaccaacggtcaggcacccttcattactgtattcatgtatctgggcgaggcccgcaacccgcaggaaaaggccgaccttgccatcattattgaagagaccatccggcagcgctatcagggcgtgaagaacgaggctggcgtgtggatcacccccgccttccccaagctgatctatgtgctggaagaggacaacatccgccccggcgccccttactactacctgaccgagctggctgccaagtgcactgccaagcgcatggtgccggactatatctcggaaaagaagatgctggaactcaaggtggacaagaacggcgagggtcactgctacacctgcatgggctgccgcagcttcctgaccccctatgtggatcccgagaccggcaagcccaagtactatggccgcttcaatcagggcgtggtcaccatcaatctggtggacgttgccctgagctccggcggcaattttgaaaagttctggaagatctttgacgagcgtttggcgctgtgccaccgcgctttgcaggcacgtcatcagcggctgctgggcacccccagcgatgccgcccccatcctgtggcagtacggtgcactggcccgcctgaagaagggtgaaaagatcgacaagctgctgttcggcggctactccaccatcagtctgggctatgccggcctgtacgaatgcgtgaagtatatgaccggcaagagccacaccgacgccggtgccaagccctttgccctgagcgtgatgcagcacatgaacgacaagtgcaacgagtggaagaaggccgaaaacatggactactccctctacggcaccccgctggaatccactacctacaagtttgccaagtgcctgcaaaagcgctttggcatcgtggagggcatcacggacaagaactatatcaccaacagctaccatgtccatgtctctgaacccatcgacgcctttaccaagctgaagtttgaggccgacttccagcgcctgtccccgggcggtgccatcagctatgtggaagtgcccaatatgcaggacaatctggaagccgtcatgagcgtgctgcagttcatctacgacaacatcatgtatgccgagttgaacaccaagtccgactactgtcaggtgtgcggctatgatggcgagatcaagatcgtagaggacgacggcaagctggtgtgggagtgccccaagtgcggcaaccgcgaccagaacaagctgaatgttgcccgccgcacctgcggttatatcggcacccagttctggaatcagggccgcacgcaggagatcaaggaccgcgtgctgcatctgtaaaaacagcaaaactttatttttgatttgatgtttggagcggcctttcggccgctccaaacatcttttcagcaaacgacaggaacattagcatgaactacgcaaacatcaagtattacgatatcgccaacggccccggggtgcgcaccagcgtttttgtatccggctgccgccaccactgcccgggctgcttcaacgccgtagcatgggactttgcctacggtcagccctttgataagaccgtgcgcaacgaggtatttgcctcctgccagccggactatatcgccgggctctccctgctgggcggcgaaccctttgagccggagaaccagcgggagctgctgccctttgtgcgcaacttcaaggcgctgtaccctgccaaaacggtgtggtgctattccggctacacttgggaacagcttaccggcaaagagcccagtcccgcgcggtgcgaggtgaccgacgagctgctggcactgctggatgtgctggtggacggcagattcgtgcaggccgagcacgacatctccctgcgcttccgcggcagccgcaaccagcgcctgctggatgtgccaaagtcccttgccgccgggcagcccgtgtggtgggaggacgaaaaggtgttcgccacccataccatggaacggtaaaccgtattgaatccctcccgtgaacatcaaaagaagccgctgcacagactgtgcagcggcttctttcttttttcactcccggctgcccacggcgtcctcgatgacgcgcagaaaggcgttgccgtagcgggcggctttcttttcgcccacgccgctgatgttcagcagctcgtcgatgctcatgggctttttctctgccatctcccgcagggtggcatcgttgaacaccataaaggcgggcaggttctgcttgcccgcaaggcgcttgcgcaccgcatacagggcgttgagcagcttttcgtccgcttcgctcaggctgccggctgcggcgggctttgcgcggcggggcttttccagccggtcggcgctctgggcggcacggcggcgggcgtactccacctgcagctgtgcttcctgctcggcggcaaggcagcaggagcagttgccgcacttttggggcgctgcttccccgaagtattgcagcagaaagccgcgcaggcagtgctgggtggtggagtagaaggtcatgtacttgagccgctcctctgccttgcgggcggcttcggcctttacatcggcgggcagaccgttgtcggtctcccgctccttgtcgataaaaaatcggatggtgcgcacatctgtgccggaatacagcagggtacaccgggcgggctgaccatcgcgcccggcgcgtccggcctcctgataatagctttccagatccttgggcatattataatggatgacgaaccgcacgttgggcttgtcgatgcccatgccgaaagcattagtggcaaccatcacctgcacccggtcgtagaggaaatcgtcctgattctgccgccgggtgtccgcatccagttttgcgtggtaggctgccgcccggatgctgcggctctgcagcagctgcaccgtctcgtccacctgccgggtggtgctgcaatacacgatgcccgcatgattgccctctttgagcaccagctccagcagctccttgggcttctggctgggcagcgcccgccgggtctcaaagtacaggttggggcggtcgaagctggtggtcacctcgtaaggatctcgcagcgccagatgggtgcggatatcctcccgcacatgggcggtggcagtggcggtgaacgcgcctatgaccgggcgggcgggcaggctgtccacaaatgccttgatgcgcagatagctggggcggaagtcctgtccccactggctgatgcagtgcgcctcgtccaccgtgaccatgctgatctgccgctcctgcgcaaaccgttggaagcccggcatctccagccgctccggagccacatagatgatcttataccagccctcccgggcgcggtgcagcatcagcgccttctggttgtcggtcaggctgttattcagaaaagccgccgccacgcccgcctgcaccagcgctcccacctgatccttcatcaggctgaccagcggggacaccacgatggtgatgcccggcaaaagcagtgccggcacctgatagcagatagacttgcccgcgccggtgggcatgaccgccagcacatcctgtccggccagcaggcggctgacgatatcctcctgcccagggcggaagctgtcgtagccgaaaacttttttcaggatactgtgcgggttttccatggtctcctccgttatataagtaggtgcgctgacgcgccgatcgctcaaaaccttatcagtataccacaaaaccgatacttttggcagaaaaaagcgtcactttgcgcaaaaatgtgcgatatccactctttctgcccgggaaggatagcttttcaggcgcgaaaatgctataatgagaacacatatctccatgccacccccgcagactgcccggcatggatcatgcaatgtaaaaaggagcatttataatatgcagcagaaacttatcacctttgccgtgccctgctacaactcggcagcctatatgcgtcactgcatcgaaacgctgctgagcgcaggcgagcaggccgagatcattctggtggacgatggttccgtcaaggatgacacccccgccatctgcgacgagtacgccgcaaagtaccccaccatcgtcaaggccatccatcaggaaaacggcggtcacggcgagggcgtcaatcagggcatccgcaacgccaccggcctgtactacaaggtagtggacagcgacgactggctggacaccgacgccctgaaaaaggtgctggagcgtctgactacgctggtagcccgcggcaccgcgccggatctgatgatctgcaactatgtgtacgagcacgtggaggacggcaccagccacaccgtgcgctacaccaacgtgttcccgcagaaccgcctgttcgactgggtgcacgtccggcacttccgcccggatcagaacctgctgatgcactcggtcatgtaccgcaccgaggtgctgcgccagtgcggcatggtgctgcccaagcacaccttctatgtggacaacatctttgtgtaccagcccctgccctacgtcaagagtatgtactatatggatctggatctgtaccgctacttcatcggccgcgcagaccagagcgtgaacgaaagcgtgatgatcggccgcgtggaccagcagctgcgggtcacaaagcacatgatcgactgtcaggatctggacgcgctcaagggtcagaagcgtctgcgcgcctacatggtgcactacctctctgtgatgatggcagtcagcgacatctttctgctgctggacggcagcgccgaagcacacgccaaaaaggcagagctgtggcagtacctcaaggatcacgtcacccccggcgtctaccgcgccgtacgcgtgaaccttggcggcctgaccgacctgcgcttccccggcggcgacaaggtggtcatttccacctaccgccagctgcgcaagatcttcaagttcaactaagggcttttgcaaaacagcaccaacaaaaaagagataggtttccccgaaaggggttgcctatctctttttgctttgatcttatgttttcagccttctgcccgatcggtatggtgaaggcgggctattttccttatcaggcacccacgatcaggcgcacggcgccgtagatgccggcatcgttgccaaggctggcggccttgatgggagtctccttacaggactggaaggcgtactccttgtagtggcgcaccagcgggttgaacagaatctccccggcgcgggccacgccgccgccgatcatgaacatttcggggtcggtggtggcggcaatgtttgccagtgccatgcccagcgtggaggccatctcgtccacctcgcgggcagccagtgcatccccggcgcgggcggcgtcaaacacgtccttggcttcaaagtccttgccgcgcagggtgcaggcggtgtccggatttgcgtccagcagtttcttcatgcagcgcacaacgccggtggcgctggaatactgctccagacagccgcgcttgccgcagccgcagacggcggtctcgtgggggttgactgtgatgtggccgatctcgccgccggcaccgtgagcgccgtcgatgaccttgccgttcacgatgacgccgccgcccacgccggtgcccagcgtgaccatgacggcactgcggcagccctgtgccgcgcccatccagatctcgcccagcgcagccacgttggcgtcgttgcccaccagcacccggatgccgcccagcagctcgctgagctcaatggacacgttgcggttgccccagccgccaaggtttgcacacacgatgggcacgatgctggaatccagcaccgggccgggcacgcccagaccgacgccctcgacttcgtctgcggacagacccttttcctgcatcttctgctgcacggcagcagccagattttccagaatgtgagcaccattattggaagtatcggtgcttacctcccacttttccagcagcttgccgctggtggtgaacaggccgaccttggcagtagtgccgcccagatcgatgccaaatgcgtattccttcatgtcatttacccctttgatgcggatgcgccgcattttttatcagtattttatagtataccatatttttccgcaaaagagcagtgctgcggcggcatttcgtgcaatcggactgaaatccatgtaaaattttgggcagttccacaaggagattcagcgcacggcgttggtcagcgtgccaattccctcgatctcgcactgcacggtgtcgcccgggtgcaaaaactgcggcgggtccatgcccatgcccaccccggcaggggtgccggtggcaatgatggtaccggctttcagggtcatgccctgcgaaagctcgtggatgacgtggtcgatatcaaaaatttgcagcttggtgttggaatcctgccgtagttcgccgttcacccggctgcggatgggcagcgcaggcgggtaggtgtcaaattcgtcggcggtgacgatgcagggccccatgggggtgaagccgtccagacttttgccgaaataccactgcttgtgggcggtctgtacgtcccgggcggagacatcgttcaggatggtgtagccgaacacatagtctttggtctgcccggcgggcacatccttggcgtccttgcccagcaccaccgccagctcacactcgtagtccagcttctgcacaaggtctgtgtgcgcctcgatgaagccgccgtccggtaccgcgcggctgacccgcttggagaagtagatggcgtcctgatgcttggtggcaaaggcgtccgcagaatacttttcggcctcatccgagtgcgccatgtagttgatgcccagacagaccacgtcctgtgcagggctggggatggggctttgcagggtgacggcttccaccggcagcgcggggatgccgctgatggccagctgcaaaccgaaccgcacctgcggggtgaggaaggggatggcgtcagacagggtctcgtaggagagccccagccagctcagcggccagacctgtgtgccgtcctgcgagaggatggcagggtcctccacaccgtccggcaggcggcaggtgacaaaacgcatacagtcccctcctctcagtgccggtaggcgatggcgctgcggatgcggtcggcttccgcttctccggccagctggcgcaccagctccagcgcaaaggggatggcgccgcccagaccgtagctggtggtgatgttgccatccacgaccacctcggtgtccagcacatgggcacccgccagcttgtcctgaaatgcagcgtgggcggtggcatttttgccctccagcagacccagtgccgccagcacgctgggtgcggcgcagatggcggctacctttttgcctgcctttgcaaaggcaacgcaggtgtcggtcaccgtcttgttggcggcaaggttcggcgtaccgggaatgccgccgggcagcaccaccagatctacgtcagaataatcgacttcctccgccagcgcatcggcggtgatgtgcaccttatggctgctcagaatctcccggctgccggaagcgcttgccaccagcacctccaccttggcgcggcggagcaggtccaccaccagcagagcctcgcactcctcggtgccctctgcaaaaaacacaacagcttttgccataagaataacctcccatatcaaatatcaaaaagaaaagccgcgtgccgcagctttgggcaacagcccttttggcggtacgcggcctttggatcagtcagcggactttttttcagcttccagcagcgcacgcagcacactgtcgtccgcgctcagcacccggctgacccggctgatgatagcgctggacgcaccggtcttgtccatgatctcggtgtagatgcacttgtcggccagcagctcggcaatgttgtagcgctgctccattgcgctgagctccgaatagctgcacacgtcctgtagaaaacgatagcattcctccggggtcttgagctgcagaaaagcccggtacagtccggagttgccggtgggatgatctttcgccatgatagtctccttttttgcacagaatgcccgcagacagcggctttattacactacatcagtgtagtacaaacgcggataaatttcaatggctattttatgatttctttgaaataacagcttcgatttaaggcttcccccggacgggggaagctgtcaccgcaggtgactgatgagggcgcaggcaagcggcagcttaccccgcgaccggcgaggtgcatattcagctcagggtatgctcatacaccagctcgttgcggggcacggtgccgttttcctgctcggcggggcgcagctcgcggtagcgcagcgccttgaagaactgctgcaccggcagcgccttggcatggatggtgcaccacacccggcccttgccctcgcccttggccagccgctcgcaggtctgcacgatatccctgccgatggccttgccgcggtactccggcttgaggtacaggtgcatcaggtgcagggcggtgttctccatcttccacgcaaagtagccgatgagcttgccccccagaaacaccagaaaatagttcacgtcgttgtcgatgtccgcttcaatggcgtcggcgctctgcagctcctccacaagggtgtccagctgctttgcggggtagtagcgcttgtagacctcgtgccacagctcgctggcaaggtcggcggtgttgtggatgtatttggcctttgcgaccagcttgtaatcaggcttcataaaactccttatactcttacgatgtaatccggtttgcggggcgcggcgggcttgggttcggcggcggggtagcccagaatgcagtggcctacgccgatccagtccccctcaatgccccactttttcagcagtgccttgccctcggcggagtcgaactcctcccgggcgcggttgatccagcagctgcccagccccagcgatgcggcagccagcatcaggttgcccatgacaaggctgccgtcctgcacggcgcagtttgcgtgggcatcggccagcaccaccagaatggtgggtgcgccgtacatggggtcgctgtcggcacccatgacggcggcgttcatccgggtcagttgggcgcgggtagcggcatcctgcacgaccacgatcttagcgctctggcgtcccatagcgctggcagcgtaggtgccggcctccagcacggcgtcaagctctgcatccgtgatctgccggggctcgtaggcgcggcagctgcggcggctgtgaatggtttgtaaagtctcgttggtcatgaaagatcccctccttaatagtggatggctttattgtaccacaacctgcgccggagtgcaaagtgcccgccggtaaaaaccatcggaatcaatttccgcttaaaggcttcccccggacgggggaagctgtcaccgcaggtgactgatgagggcgcaggcaagcagcagcttgcgggaaattacccctcatccgcttcacttcgttcagcaccttccccccaaggggtgaaggcttttgtcctgagccaagatatggatttaacttccgaaaacgtttgcgctgcaaaaacacgacagaatgcacaaaaaacaaaagaaagattatggaaaagcattcttgttgccagcgggcaaatcgggtataatagggctaccatagcggaaaggagttgtgctctatggcaaaggcatcgcaggtcgtcattatggagggggaatactacatcatcaagtcccccaacgggaaggtactggaagtaaaggatttcaacacggagaacggcgccggcatccagctgtggagctatgcgggccatccgtggcagcagtggcagtttgtggacgcgggcgagggacgctggcgcatccagaaccgctttaccggcaagatgatcgatctggcacttggcggcgttgtggagggcacatggctgcaccagtggagccgcaccagcgggctgagccagtgctgggcgctggaacctacccgcagcggacgcacccgcatccgcaatgtgctgtcggataagtacatcgaccttgtgggcatgaacaccgccaacggtgcacaggcgcagatctggaactatgtggcgggcggcaatcaggagtggacgctggagcgcatcgaccccgacgctgcccaggccggcaagcgtgccggggaagccaaagacccccagcccacccccagccagcgcaagcaccagaacgatctggtgcgcaagctgaacagcgcaggcaagggccgcgccgggcgcaaggcataacgaacaaaagcgcatccgctgctttgtgggcatccgcagcggagacacttcccaaagggctgctgcacagcgtttcatgcagcagccctttttatgaaaagagatacggtcagcggtctcgccctctcagtcatcgctacgcgatgccagctcccccaaagtgggagcccttggcagtccacacaaacttcatctctttgccaaggcctctccctttgaggaaagacttcccccgcaccgggggaagatgtcgcgcagcgacaaaagggggagtgtggatgcgaacgcagtgagcagacggagagggcgagtatgctgacaaaaaacatcggacaaaaaaggagaactccccatgaacttaggcgcatttatggatccggaatttcccatcttcagcaccaccctttgctatctggagcgggaggacgcttacctgatgctgcaccgcatcaaaaagcaggatgactacaaccacgacaaatgggtgggtgtgggcggcaaatttgagcggtttgaaagcccagaagactgccttgtgcgggaggtgcgggaggagaccggccttaccctgacgcgctaccgcgcccggggactgctgacctttgtgttgggcaatatgaccgagttcatccatctgtacaccgccgaccggtgggagggcgagatgataaggggcgatgcctgcgccgagggcgaactgcagtgggtgcagaagtctgaggtgcaaacgctgcccatctgggagggagacaagctctttttccgtctgctggaggaagagcatccctacttttccctcaagctggtgtatgacggcgataccctgaagcaggccgtgctggacggcaaacgcatcgtctgagcaagctgcaaaaaagaacaaaaagcatcggcagactccgctggttttctgaggttcagaagcggaagctgccgatgcttttacttatgttctttgtttgtgcgcggtcatccgcgcacggcgtccttcatgcgtttgacgtaggcaccgatctgctccggtgcggcagtgccgtactgctccagcagcttgatgatggccgagccgacgatggcaccatcggcgatgcctgccatctttgcggcctgctccggggtggagatgccaaaaccgatggcgcagggcgtcttggtgttctcccgcaccacctttacaatggtggcaaggtcggttttgatctcactgcgggtgccggtgacgccaaggctggacacgatatacaaaaagcccggcgcttctgccggaggagtgtaaaagaaaaacgcccctgacagaagaaaccttcttctgtcaaggacgaataaagctaggcctttgatccgcggtgccaccctgacttcatgggaacgaccccatgcacttggcgggatgccaacacatccccggcaactgacgtatgccctacgttgcagaatactgtgcggcaaaagcaccgcagttccctgcaccctcagcggtccatttcaggaaaaagcgacgcaaggccgccttttccttgacgaactgtttccgatctgcttctcagctgcgcaggctctctgtacaggcatggttcgccgttatctccgcttcaacggtttagtgtattgaatttgcctatattaaagcacggatttgggatttgtcaataccaaattttgcttttggaaaatttcacctatggctgagccaataccagcccggatgctcctcgctgcttgtgatctgatccgggtgctcaaacaatattgcatactgcgcaattttttcatccgggatgtcaggggcttccgcaaagaactttccgttttcagcggcgggattctttgcgcgggcggtattatacaagatgatatggttcgtatcagattcgcccagatctccgatctcatgggtcacgatgccgtcaatgacggtcagtttgccgtcaaggaagctttcttcaccagccatccgtgaaacgaaacaatcatcgatccaataaaccgttccatcgccaacatagcgtgtcatttggacgtgtgctgccccgaacgaaccgaaatactttgcagttggattttcctgatagatccgctggagatttgcatacagggcatcctcccgataagccatagccttgccgccatgttgaagctctgcctgataatcgttcagttcattgcacgtcagctcctgttgccagcctagaagagcacgctccagatggatcatcttatcgcccagcactaattcgagctgttccggccgagtctgcatctgcttgatcagctgtggcagcagactgctttgaaaacgatactgcaaccggcatttctggatgccgatcaaaagcatctgtgtctctctgtctgctgctgaaaaatcacaatctttcagcagatacttgcagaaggtgcagagcatctcaatcgaatccgtgatgtctgcgccaacgatggagatcttatccttgtccggtctgtttcggttgaattccgacatccaccggaataattcgtagtcctcttgggatatcgtaaactgatcgaacgcatcggaaaaggtcatccggttctgtatcgtttcgttttcgataaagccgcttgcatagccatgctccatcaaaaggacacgcacaccttttttctccacaagatacttgaatagcacattgcggaacttttggtattctacttttcgatgaatctcgccaaagatatagacctgcgcgtcatcgtatcggagcattctggaaagcccggaaccggtggagagatcgatgatctgagagcttcttggataaagttcaaacacaagagcgaaaagaaggacaagagcagctgcgaaagcgaggaacctcttgcgcaaactgctgttatattgcggtgctttcatgacgacactccttggtattttataatgcgggaaggcggttttgttttacgctcataccacgaaaaaatccacattatggtaacgaaaaacggtttttctgtcatgaaaaggcacggctctgtcctatagagtgcactatttgcgatttcaacctaatcgtattataatcgctgtgagagcggatgagatattttgaataaccaaaagccggttcgtttatcttgggggaaatttcagatgaatgtattgatctgtgatgatgagtggcgtgttacggagcaggtttcagagctgctccaaaagcattgcgcagaaaatggaatgcaggtgcggtttcacctgtttgatgatccctgtgcgatcaaagaccttatggagtacgatatcgcgattctggatatcgatatgggagacttcagcggcatcgatctggcgtggagacttcggaaagaaaaaccggggatcgtgatcatttttctgaccaacttcatccagtatgcgccggaagggtttgaagtacaggcgtttcggtatcttttgaaaaccaatatgcaggaaagactggcatcctattttgaggatgcagtcaaagaagtggtccgaaaaaaacaaatcattacgatctccgtcaattcggaattgatcgatattccggtaaatcatattctctatctggagtcaaatctgaggatcgttatcatgcacctgatccacgacgaacggaccgaatatcggttttatggaaatatgacagatttatcggaaaagttggaagaccttgggtttctgcgtatccaaaagtcctttctggtaaatatggagtacatcgaacagatgcagtatgaaaaggtgcacttacgcggagggatcgttttgccctcaagcgctaaaagccacaaggaattaaaacagcattacttgaagtggagagggaaaaatcgatgggcgatctcttgagctttctttatacggtggtcgatacactgtctttgatcttctttttggatgcatttgcccaaagacggtgggataattggaagtttacgttgggcatcgggtgccttgttgctctgaatttctggatcctgcaagttccgcttgttttctttggccgagatccggctgtaaagatcggcatgatccttttgtcgtacacattgagcgcaagagcattgtatagagagatctccagcggaatgctgctgcttttagtctgtatagaatatctcatgacctattgtttgtcttttgggcttggcatggcaggtgcttttatctgcggaatggacggagcgtcctttcaaacaagttttccgcttatgataagctatggagttatcaactattcggcagagctttttctggcatacacattccgaaagcttatgcggagaagaaggagcttgagaacccccaacaagctgacgggcgtaaaatcaggtctttattttttgtttccgggaacatcttttgtgatgctggtgcttttgctgtacatgacggctggtaaaaacgcaagcgaaatggtgattgctgcggtatgcggtttgatttttgccgcaaatgtggcagtgctgtatcttttggaacgaatggaaaagaccgttgaaaatcaggaaagagttttggcgctggaacagcagctccagtttcaggctaaaaatatggaagccgcaagtcagctctatacggctcagcgccataaggtacatgactttcaggcacatctcaatacacttcaagatcttttgcaaaatcaggaatatgatgcggcagagcaatatttgaattctgtatccaaggaacagacagaccgatcgttcctcgtcaactctcaccatgcgatcttggatgcactgttcaatacgaaagcaacggaagcgatccagaaggggatcgacattgatttcgagctgaacgatttatcggctctgccttttgatgtatcggatatggtcgtcctgttttccaatctgctggataacgccattgaagcctgcgaaaaaatcgagggcgatcgggtgattcgggtttctgcagtgttaaaacaaagctttttgttttctgttcggaatacgacccttccggtcgaaataaaaaatgatacgatccagacgacaaagccgaatgcaagtcttcatggattcgggctttccaatataaaacttattctgaacaagtatcacgcagactttgttatggactatgaggatggatggtttcagtttaccggagagatcgaagcgcaggtgaggaagtagtgtatttgatatgggaaacgttctgaccaacttgcactgcttgcagcgaatgcgaacgccttttgaattgcaaaatgatttttcagttgctatactgggcttaccaaaatttttttcgggaggacgccgcagtgactgtacagacaatgcaaatcgggaataaaccttgccgtatttacggcagggctaatgcagaatacctgctgctccaaatgaccggcgaacacgagctgcaaagcatggaaagcgaggttaccgctattgcacagagtgcgcaccactttctgtttgcggccattccggtggcaagctggaacgatgcactttccccgtgggaagcccctgccgtgtggggaaaacaaggtttcggcggcaatgctacggataccctgcgctttctgacggaacaggtcatccccacactgaatcagcagtatcccctcccggagaacgtcaaaatcattctgggtggctactcgctggcgggattgtttgcgctgtgggcatccacccagaccgatttgttctacggtgtcgccgctgcatccccctcggtgtggtttccgggctggatggagtttgaacaacagcacccaatacaggcacagcacgtttatctgagccttggcgacaaggaggaacgcacgaaaaacaccgtcatggctgcggtgggcgataatatccgcaccctgcacagtcagcttatagcgcgcggtgcagactgcacctttgaatggaacagcggcgggcatttcaaagacgctgacctgcgcacagcaaaggcgtttcgctggatgatggaggaacacacatgaccattcgcgtttgcgaagcaatgaacgccccagtggggcgtttaagcgacagaacggtttgcgaagcaaatggaggggtcttgccccgacaagttctgatcgatgcagacggctgtccggtggtcgatctgacgttgcagattgcaaagcggtttggcgttccggtcatcatcctgtgcgacacctctcaccaaatcgagcgggaaggtgcgcagacgctggtgttcgacaaaggagcggacagcgtagactttgcgctggtgaaccgggtaaaaccgagggatgtggtcgtgacacaggactatgggctggccagcatgtgtcttgccaagtgcgcccgggtgctgaaccagaatggcttggaatacaccgccgacaacatagacgccctcatgctgcggcggtatgaaaacaaaaagctcctccgtgccggaaagcacccaaaggggagcccaaagcggacgaaggagcaggatgtcaggtttgcggacacgcttgagaagattctgagcaaaaaatattgatacattctttttaatggctggagaacataaaaaggcaccagcctgagctgatgccttttgttggcggagatggtggatattctcccgcgggctaagcaacagcaacgggttgcgtttgctgatttttccgcagccccttggcagggctttgaaaaatcagaacgctgccccaacaactcctccctgtttctgccacaggcagcggtcgtcgtcgttgcactgggctgattgcttgcggtctgcggaccgccgccctgttctcatcctcaccatctttgccgcaaaaaaagcaccagcctgagctgatgctttttgttggcggagatggtgggattcgaacccacgtgcccggttaaggacaaaacgatttcgagtcatttcccgcttatgacttttggtggaaattaagcgaagatggaagtacacaacggaagcccaaaagctgcggtatactgcggattttggcttccgtttttcgcttttatttgaacccaccgggttttccgagttcttcccgtttttgccccgaattatgaccggaggatagaacaaggatagaactgcacgccagatcgaggagtttaacacccatccctttttacgaaaacgcaaatctcaatttgatttgtcatcctaattttatttgaactcatttcaaaagtcaacattatacgacgcaccagtgaagtacctcacctaccaatgacagatgaacaagaaagtgagtgctgcacatggatttgaccaagtattaccccgacatcgccgcaaagtatcccgcctatgtaacccaacgggaactatgcgagatctgccgcatctgtcccaagaccgcctacaatttggagcaacaaggtgagattccctacaccattgagcaaaaccacctgatccgtagccacaaaatcaagctgacggacattcttgcctatctctatcggcgtgagtgcagacaggaagcagacagtccctatatctgtgctatgagaacattctatgacaaacatctatctccctactcagacctgctttccgtaaaggatattcagcagattacaggcttttcgtcctcggcaatcgtgcggtggatcagcatagggattctgaaggctttccagcctggaaagcagtacaccgtcccaaaggattttatgctggactttctgataagcccatattaccgccgtatccgccgaaagacccctgtccaaaaggaattgatggatacatttgagcgtctgtggcaggaaaaaggaggcgagtgatgtggcacaggtatccaagtatcgctatttgctgaatcagtacccagaaacagtccaaaaagagcaattccgcatcatctgtcatatcagcaaacgcacagctcgttatctgctgcaatccggtctggttccctgcgtacagagtgggaaaaagacccggaattacaccattaagatgaaagacattgttcgctaccttgagcgcagggaaatccaccccgagaaatacaaacttccccccggctcatatagcgggacatacgcagtcaagcccctgcttcccgaatctgtgacaacggaggaactgcgaaaatactacatagagagtttccgggacattcccgacatagtttccacgagagaggccgcggaattaacaggcgccacggcatctacggtcgcaaaatggatcagaacgaaaaagctgaaagctctttcacatggtccggcatttatcatcccgaaggtcaatctgatcgactttatggccagtgacgcatatttgaacaaacgcttgaaatcacaaaaattccacgaaaatataggaggttttctatcatggaaagagggaaaataattgttgtagccaaccagaaaggtggagtagccaagaccagcacggtccgaaatctgtcctatgcgctggccgagatgggcaaaaaggtcttggtagttgactttgacccccagtataacctcaccaccagtttcggtgtcctgccgacccagacgccctgtaataccgggactctcatcaccaatctgcttctcgacgaatctctgccggataccaacgagttcatccagaaaatcggctctgtggacttgatcccttccagccgctctctcaccgttgcggaggcaaatctgctgatgacgccggacagcaatgactacctggctgctctgctgaaccctctgcggctgtcctacgattacattatcgtggacaccaacccctctctcggctcgttgaccatcaacgctttaacggctgccgacgaggtaatcatcccgattgacccggaactgttcgctctgaccggtttgcaggcgttggtggacaccatcaagaaaatcaagcggaaattaaatcccagcattgagatcggcggtatcctgttcaccaaatgcaacaagcggacgaacctgtatcgccgtacatacggtcaggtcacaaaggcattccaatcgctccccatcttcaactgtcagattccctacacggtcaaggtgggggacgcaaacagctacggaatgagcgtcatggaactggagcaggcaaaccccgcctctcttgcctatctggaacttgcaaaggaggtgctggcaaatgcctaaaatcaatccgcgcatcaagtccattgacgatcttctgggcttggatgccgcagaagaaagacctattgaacccaccccttccgtatccttgccgaccaagaacaccatcatcacccttcccccgcaggccattcgtgctttccgaggccacccgttccggctgtatgagggcgaccggctcaatgatctggtagaaagcattgcggaacatggggtcctgaatcccgtcatcatccgcaaaatcgaacgggatgaagatggctttgagtatgaaatgctggccggtcataaccggcagaacgccgcagctattgcaaaccgtgaacttccctgtatcgtcaaggaaaatctttccgatgaagatgcctggatttatgtgatcgaaaccaatgtcctgcaacgctccttctccgaaatgctgccctctgaaaaagcggcggtgctggctctgcgctattccaagatgatctgtcaggggcgccggaacgatattgtcgaggagttgaaacggcttgaaaaccctgatgaaatcagggaaaccgggacttgtggcattgagtgccacaagtcgaaaagccgtgatgttgtaggcgcagaatatgacctgaaaggccgcgccgttgcgaactatctccgcatcaatgagttgattactccgctgaaaaggcgaattgatgacgccgagttcccgattgtggtagctgtgcagctctcttatctgaccgaacaggaacagcagatggttgacgatgtgctttcgggaagcgagtacaaggtcaatgagggaaaggttgtcctgctgcgggaatataccggaaagctgaccccggagcgtaccgaacagattttgtccggcgagtttaaccggaaacccaaaaaatccacggctacggcgttcaaggtcaaaccggcgatttacaagaaatactttaccgccagcatcagccagaaagagttcgacagcattgtggacgaggcacttgccctctactttgctcagaaaggacaggagtccgagcaagaggccggataaccggccataatcaccaacacaggaaggaggtcagataccgttgagaaatgatgaacgcctgcggacgatatatgaagtcatggctccctatattgtccgaaatgaacacaactggcgggattatctggcatttgcatcgcagttccataagcacagttttgacaacatacttcttgtgtacgcacaggacgaggatgtttcgattctggcgacacgaaagcaatgggcagccataggcagaaatttgattccccgtgcaaagggcgttgctgtttgtgtctatcggaatgccaaactcacccttgactatctctttgatgtaagccagactactggcaaagagattcatcctacggactggcagctttccgatgaaatgaaagaggccctgaccgagcgcctgtcatatgcacacggtttccccaagcagggcttttcccaagcactgtatgcgctggccagcgaatctgtcgcagacaattacaaccactttttgcaggaactcaagcaggaaaccaaaggccatttgttcaccgagatcccggccggtggttttgaagcccaatacatccagcttctgaccgacagcatttcttatttcatcggcaaaaagtgtcacctgccggatgaagaaatccagttgagtgacggtatggcgacggtcagccatttcaatacactcccgttggttgctcatcttggtacggcagtaaccgccctttccaaaggcatcctgttagaagtggaacggaacatcaagatcatcaatcgtgaaaggatggcacaacatgaacaaaccgaatatcaatctgaaatacagagagcaggacgggatgatgctgcccgatctgcaaatctccaacagcagcgaagcagatcagcctctgggcaggtacggccggatggccctggaatacctcagagagaatcacccggagcgatttacgactttgaaaatggatggcagtctgatggagatcatgcaccgggtacaggacgaggcgaccgagaagatcgaagccctgacccagcaaatgctccagcaggagccgatcccgcagaccgaggacatcatggagcggacgcgccacctgaacagtctgaaactgatggcggaggaaaccgtactccagagcgtagtcctgattccccgctgaccgaagaacatccaaatacagaagcggcgccaagcgccgcacctgtgggagagccgtctgaaaaggacggctctttttctgttcctgcggaacaaccgacacgccattttaccgatgcagaagtccggcgcaattatgagtacatcctgaccagcaccaatctataccccccagagctgcacagcgcggttcgcagcgtattgtcagaaccgccgctcaatcctgactggtcagacaaagggcggcagattgcggctctctttactccctacggcgaccgtgaatatcagggcgattttctctatcgtacccggttgcatggtgaagatggcatttcatttttctttgatgaaggctatacctacattccctggaacgggctggcgtttttactggatgccatgatcgaggatggcgactatcccaatcctgttgtagaggagcagcctgaccccatcggggattataacatccctgatgaagttgatgaaatgggcggtcctcaccggcaaatgaccattggagaagcggattttgattatgttctggatgctgttgcctatgaagccggagaaaccgtagtggaaccggtcaagccgcaggcgattgttcaaatggaaaacgacacgccagcagccggtgacgagcctgcatccgttcctgacgaaaatccccctgttgttgtggaggcccccgaaacggctctccccacagatacagcggagcagcctacaccgccgcccgtcaaaggaaacacaacggcgcacaagaatttccgccgctttcaagagttgttcccggagattgtgtccggtcaatatgagtatctgcggctggaggccggagaagcctactatcctctggtcattcaccataaatacggttcccattactgcatggagcattactatatgcagaacggcgaccggatgtatgacccttatatggacttccaaatcgacaaagaggctgggacacttcgggctttcagttatgagaacagcggcattggtgtatataacgaggctaatcccgacgaccccgcatacgagaaagcaatcaacgggttcaacagtttctttgccacctggctgaacaatatccgcagccaaggctatgagccggtgcgggcctctatgatggtcaacgatgaagaagtcgatgtggatctgcgcccggctgccgaagctgttccggtcgtggaagaagaacagccggagcagctctcccttctgtccttggaaaagagtacggaagatctgcttgttgagcgtgtcatgcaaagaggcccccttaccgcagggaaaaaagaacaaatctacgagtttgctcagacccaccccaccggatcagaatttactgcttttctaaaaaagctatatggatatgaagggttctccggtgatgaaatgggcgtgaaatacgccatgttcaatagtgaaggtgtcactatcgaatggcaggatgagcagggcgaaacacaggaaacaaagctgtcctgggcgcgggctgccggtgtcgtgcaacgcctggtggatgaaggccgctatctggaaacccctgttgtcagccagacggagcagcagaatgaagtgcagcctttcagtgaccaataccgtctgttagaccgtctgtgtgctgactgcgagtattttctgggggcgggacagcgggcagaaaagcatttgtgggcaggcagcgtggatgcacagattgagaaaatgcgggaactgtatgcccaactgccggaaaaacctgattggatttccctggatgtaatcaacgcctacgcccgccgcatggcagccccggagccggtagaaaatactgcggaagcctcgccggaggaaacgcagattttagacgaagccctggacgcccatcatgggcagattgatatgctgatgcaggcggtccgaggtgagctgacggttggaaccatccggtacagtatttttgaggggcggccccatatcagcatgattgaagttctggaggactaccgccgtcaaggtatcgcaacccagatgctccgctatctgcaagggcaatatcccaatgaggaaattgtatgggggtatttaaccgaggatggttcggccctgtaccaagctgtggtggatgagcagcccaatcccgactatctccgggtacaaaatgaccttgaagatattacgcgggaatttgacgcttatgtacggcgcctggacggtggggctattctctccccccaagaagctgccgacatggacgatctggaggacacgcaataccggctggaaaaagagttggaagaactgcgccccattcgcgcctttgtacgaatgggcgatggtacagcagcagaggtgcccgctgttatgggtgaagccactcgcactgatctggcgccccttcgtgagccgcctgcggcgccgcaggtcgccgcacacaacttccgcttttccgaggactatgacctgtatccaagtggggcaaagaccaaatataaaaacaatgtcatggcgatcaagctgctcaagcagattgagctggaaaagcggacagcgacaccagaagaacaaatcatccttgcctgttatgtcggatggggtgggcttgccaacgctttctccagtacggcctctggttgggagaacgaatatcaggagttgaagtccctgctgactgatgtggaatacaaggcggccatgaactccaccatcacagcctactacaccgagcctgatctgatccggcacatttaccgcgctctggaacggtttggctttgaaggtggtcccgacagaaaaatcctggaccctggtatgggaaccggcaacttctattctgtgctgccggagcagtttcaagagagcaagctgtttggcgttgagttggattccatcactggcagaatcgcaaagcagctttatcctgatgcggatatttccatcatgggatacgaagccaccaaatttgaggacaacagctttgatgtgattctgggcaatatcccgttcaactccgtgaaaatctatgatcggcgctacaatgacctgaacccgtacatccatgactattttttcattaagtccctggaccttgcgaaaccgggcggtatcattgcctttatcaccagcaaaggaattatggatcgcaaggacgagagccttcgagaatatatcgcgcggcgggcagagttcatcggtgctattcgcctacccaacacagcgttcaaggctttggcgggaaccgatgtaacagcggatgttgttttcttgaaaaagagagcgcatcccatagaacttgatcgcacgaatcttccgtcctggattgaaactgacctggaccgcagtaaatggatcgcctataaccgctatttcaaggacaatcccgaaatgctcatgggcgagatggtgagcagccggaatatgtacggcaacgaagatgggacagcctgtgttgccccggaagattttgacctgaaccagcatcttacccaagcggttgattccctgtatgcccgtttcaccgcagagccggatgaagaaatcgaggcggacgaaccggaagaaagcaatgcagagtatgaggacgccccggccggaaccaaaaacttcacctatgttgtgcggaacggcgagatcttcttctgtgaaaaagataagctgatcccacagccttacaccggcatgaaggccgaaagaatcaaggggctgtgtgagattcgtactgcgctgctggaggttatcaacatccagtcccatgagtatgacccgcttgatcttcagaaagcgcaggacacacttaatcaggtatatgaccgcttcgttgcaaagtatggagccatcaacagcaaaggaaacatcctcgctttttctgatgatgaccaattcccgttgctacgctctatcgaggatgagcggaaagacaagaccggttgggataaatcagcgatcttcaccaaagccaccatccgccccttccgtcaggtcaatcatgcagacaccgccgaggatgcccttcaaatctgcctgaatcacaagctgcgggtggatttgccctatatgtccttcctgacgggaaaagagccggaagaattggtgcgtgaactggatactcgcatctatctcaatcctcagaaatactacggcaatccgctggaaggatgggaactcgcagaagaatatctcagtggtcatgtgcgggataagctgctctacgcacgtcagaaggcagcagaagaaccggaactctttgcccggaatgtagaggctttggaggaagtacagccggagccgctgactcctgccgacattgaagtgaatatgggcgccatctgggttcccattgagtattaccgccaattcatgtatgaaaccttccagaccagtggatatgaaaaggtcattgagggcggtgacaaccggcaccgtattgacattgagtatttttcctacaccacgacctggcgtgtcaccaataaaaatgcggaaccggattccgtaatggtcaaccagactttcggaaccaagcggaaaaatgcttatgagatttttgaggattgccttaatatgcaatcctcaacagtccgtgaccggcaggaatacatcaatgaaaatggcaataagtcagttaaatatgtaatcaacgcacaggaaacgatgattgcccgtgccaagcagcaacagattcaggaggcgtttgcgtcctgggtttggaaagaaccggagcgccgggatacgcttctgcggatctacaatgaaactttcaacacggttcgtccccgtgagtttgacgggagccatctggtattccccggcatgaacacagagatgaaactgcggaagcatcagcttgattttgctgcccgtgtcatctataccgggacggggcttgctgcacatgaggtaggcgccggaaagaccgctgctttaattgccgccgggatgtacctcaagaacctgggagcgatccacaaggctgtgtttgtagttcccaatcccctggtaggccagtgggcaacagagttctaccgctttttccccaacgcaaaccttttggtatccaccgcagaggattttacccctaaaaaccgcaaccgctacatttccaaaatcgccaccggagaatatgacgccgtaattttggcacatagccagtttgagaaaatcccaatctccacagagcggcaaatcgctatgttggaacggcagatcaacgatattgaaaatgctatctatgagatcaaaagcgaaaacggcgaaaattggtccgtcaagcagatggtcattttccgcaagaatctggatgaacggctgaaaaagctgtctgccgaggaaaagaaagacaatctgctgacctttgagcagctgggcgtagatatgatgatggtggacgaggcgcactttttcaaaaactgctttgtctttacaaagctgcgaaatgtggctggtattacaacctcaagcagtcaacgcgcctttgatatgctgctcaaatgtcagtatttgcaggaaacaaatcaggggcgcggcgtagtatttgcgactggaacgccaatcagcaactcgatttccgaactgttcgtcatgcagcggtatttgcagccgcaggagttggaacgctttggctggtcctacttcgacacctggatcgctcattttgccaaacgaacctctgtgctggaattgaagccggagggcggcggctatcggatgcgtgatcgcttcgtccgcttctacaatctccctgaactgatggcggtctttcgtgaggtcgctgacatcaaaacagcggatatgctggatattcccggactcccggctgttcgcactggtaaagcggagattgtttcggtggaagcgacccccgcacagcaggcaattatggccgattttatcatgcgggcagaagcaatccgaaccggccgagtgaagccggaagaagataatatgctgaagctgaccggtgaggctcgcctgatggcgattgacccgcgcctgattcgaccggatgcggatggtacaggaagcaagttgagtgtctgcattgaggatgtttatcaggtttggaaggacaccgccgcctctgcttccacgcagcttgtcttttgtgatgttggcactcccaaagccgggaaattcaatgtatataatgaaataagaaatgtgctgctggcaaagggtgtgccggaatcggagatagcctttgttcacgacgccacttctgaagcacagcggcaggagctgtttgagcgtacccgtcaaggaaaagtccgtatcctgatcggcagcacaagcaagctgggaaccggcgtgaatgttcagaataaggtaatctccattgaccatctggactgtccgtggaaaccctctgacattacacagcgaaatgggcgtggggtacggcagggcaacgaaaacccggaaattatgataaagcaattcgtggccaaagggacatttgatgcgtatctctggcagattcaggagcagaaattgcggtatatcacgcagattcttaccgggaaacacatcgcccgctcttgtgaggatgtggatgaaaccgttctgtctgccgcccagttcaaggcagcggctaccgataatccgatggttgcacagaagatggaactggaaaaccgggtcacggaattgaaaatcctgcggggtgcgtggagtaacgagcagctttctttggagcgcaaaatcagcactatttatcctggtcagataaagcggtatgaaaaagaaatcgaccagatcggtgaggatattaaactgctgaaccaatcggccggcagcgacttttcgattgtcctggatggcaaacgctatacagaacggtcagaggccggagaagccttcgggctgctctatcgcatgataaaggaaggcgcaaaggacgattcggaagaatttgagattggtgcttatcgcagtttcccgttgtatctgtcggttgggtatgtttcacgattggttttgagatataaccaccactacacaacggaggttggaacttccgctttaggtgctatcacccgcattgaacaccttgccgaacggattcccggctatcttaaagaggcccagcgtgagttagaggaagtgcaaaaacaactggcggttgcccaacaacaggttggacagccgtttatttatgaggatgagttgtcggaaaaggttgcccaactcacagaaatcaataccaagttggagtttgagtcattacaggaaagcgaggtgattttggatgaaaacggacaacgatctgatggcgaggaagattgggattctgaaagagttccttcctgcgcttctgccgaagtataagatcatgctgctggaggcattcagcccccatgatcttctcacggcgtatatcaaaaacacactgtcgggctacccccgtctggaagatcagaacctggacgacctgacggtggaactgctgtaccccactgacgaggcggcggaacactgtatcaaagagttccttgctctgcgcctggacgatgacaacgagcatgagctggagcagtgatgtgaggtggtgatatatgggcgagaaacattcagctgtcggctatctctttcgagaaggtgcttttttgccagcccaagaaacaaagccggtccgcaatgagtttggcctggacctgtttcagcatagaggctccgtttatgaaggaaaaaccgggctgcaattctgttctctccagcaggcggaggacttggccggtttcgttgagaagcatggcggtattgaaaaagtacaaaagctgattgcagacagtttggagcgcaccggtctttctccccgctatacccgaccggatgaaaagaaaaaggacatttttccgccaaaggaaaaagacgagaaccgggtttttgccaaagacctgatgggcaacaagcactactactaccgcttctacaacgaaaatggcattgaactctacacaatggagaagaaacgggagttcttccaaacggtttatattccatgtgacgggtttatggtgggcattgaccagcggcaccgacttgaagaagttctgaaatggctgcccacgctggagcatggcatccggggtgagatcgagagggttctcaatcagagtatggaagccccggaccggtgggctgatctgggatttgcaaatctgcttggacggtatgaagaagcaaaagcccacaatgcccccattgctgcggaacggcagcggcaagctgatgaaaggcgggcgcagcaagaagtccgtgaacaacagttggcacaagaacgacaggcccgttacgattccgccattcgtgaggccgaaggagatattatggcgggaaaggaggtgataaaccgggagatcaacggtaaatctctcattatgcagctctttcgggagcatgaaattcctgttcctctcaaaacacagggctggatcatcaattcgcttcacagcatccggtatgaaccccaaaacggagaatggcactatcgttacttcaaaggcagtcgggacagcaccaaaatgtttgacctgctttccaaactgtccgctgcgattcagacccgacagcagtttgaagaacacggggcatccccgccggacacccctgtgctggactgtgaggaagaacaggagatggaactgtaaatctggtttttgaaaggagccaatatgaagaaagcaattttgagcgtatccgctgccgccgccatgattggcggccttttctattttggttggtatcgcaaccgccacggcgccaactaagcaaatcgacctgtctggaaggaggtgaagcgatatgccgatgacagcgacaatggcgccctacacccttttcatcctggatgatgatacccctatgaaccctcgtgaggatcacgactgcctggggaaaatggtctgctggcacagcagatacagcctgggcgagaaacatgattatgacgagacaagcgatttcctgcgaagcctgctgttttctgaatactccagcggccatgaccggaacaatccggtttttgcatttctcaaatctggcaaggccaaagatgcccgattggaatacaaccgctccacgcgggagtgggaattgcgggagaatcagcactggagttcagaaaacgattggtatgtgtcctccagctatgcggcctcgttgaaagatgaagtcccggactggtttttggatgattgcctttctgccctctccaccggcgaactgttttcgctggtagaacaaatggatggcatggtgattcttccgctttacctgtacgatcacagcgggatcaccatgaacacctgcggcttttcttgcccgtgggattccggtcaggttggctggatctacgcagataaagcgatgatcgagcaggaacacgggaaaatcacccctgaaatattggaacaggttcgtcaaaccctggaagccgaagtcaaggagtacgattactacctgaccaaccagtgctatggcttccagcttttcaaggaagatgtggaggtggatagctgctgggggttcctgggggaaatccgggatgttcaggatgctgtaaaggagcatctgccggaggactgcaacccggcaatcgttgaatcgctccaatttcagtatgaggaactggacatcgacgagtatttggagcgattgcaggaagaaacggagggattagactgtgagcctggataacacagtgaatgttttcatcctgtatggctgcaccttgagcaaggagcgaagttccatgcgaatcgtggccgccactacggatgaagaaatgctgcataccatcatcggcgcccaaatcctcggcggcacaatggactaccggggcttcagcaatatgaagggctttgaacagttccgggcggcctgccgtgccggtgatgttcagtatagcaatctggactatggctttgtggagcagacggaaaatctgatgctcccggactgtgcaaaggagccgcagtttgagaaagcatatcggctgctgaacctgtccgaccatgagttcaatgccatccgcaatggttctctggagagcctgggcgaagatcgcacccgtttgattctggataaggcgctgtcatgggcggcacagaactatgccggatgggacttataccgccatttgagagatgaactcggcatgagcaacgaggaaatcggaaaagccggatttgacctggatgagttctatgaggtcgaagcggcggactctgcggagtatgaagtggaggctgactatggcgaagaactttaattcttctgctctgccggaacattgctatgcagttcttcccggttccgggcagctcatagaggtcaggcgcggcgaaaagggctactatccctgtgcctactccaccagcgaccgtgagtataacaaggttctggcaaattacttcaatgcccatgagggcatttcaaaggcacaggcggcagctatgttggccggttccatgtttagctggaatgttcctgctgccgatcctgcctgttacgatgcagagggcatcccgatccaaccgggagaaaagaaagcgcccaccagatcgccggaatatcagtacgagcaggcaaagctcatccggcagaactaccagcccggaaccaaggttgtgctggatgaaaagatggaaaatccctaccgtgaaatgcctgcgggactgaccggcatcgtagattccgttgacgatctggggcaaattcattgccattgggagaatggttcttcgctggcgcttattccgggcgttgaccattttcatcaggatatgactcaggaacctgtgattgagagcagcgaagaacaggagcctgatttggaattgtgaggtgatgtgatatgagcagaagcgccgctgcgtatcagaaatttaccgaggatgagattaggaaggcaaacagcgtggatattctgtccctggcccgtggctatggatatgagccggaaaaggcaggccgcaaagctgtccacatgaagcacagcggcgggctttacatcttccccgaaaacaatcgctttttccaatggacgggtcctgatgatggagtcaaaggcggcgccattgattttgtcatgcgggaagaaaacctgtccttccccgaagcggtgggcaagctgatcggcaaggagttctctccatccgtaaagcaggtggttccctatgagaaaaaagaacgggagccgctggtgctgcccgaaaaggcagacaacatgaagcgggcctattggtatctggtttctgtccgaggtatcagccctaaaatcgtaagccactttatgaatcggaagatgatttatcaggaaaagaagtatggcaactgcgtgtttgtaggctacgatgcggaaggaaccgcccggtactgctccatgcgggcgaccagagataacagctctttcaaaatggatgcgaccggctctgataaaagctaccccttcttccacgagggcaaaaccgatctgctgattgtcaccgaggcgcccatcgacctgatgagccatgcttctattgccgctgacttttatgggcgtgactggatgcaagatcaccgtatctctaccggctgtctttggaatggagccattgaccgttatctggaaggccatccgcagatcaagcggctggtgtttgcagtggacaatgactatctggcccgtgacaagaatgggcaactgcgaaattgggggcagcttacagcggcaaagtggatgaaggcatacaccgaaaagggatatgcctgcgcggttcatgtgccgcatttgaatgactttaacaccgacctggtggaaatgcggaaggggcgttctgtggaggatttagaccgtcagcgtatggcggagctggaaaccgcatttgaacagagcgccgaggaagaaccggaacaaggtatggaggtgtaaaattggcaaaaatcaaaacctttgaattggatcgctggagtgagccggatgaaaagcggcgtgtccggcacatcggcatggccgacgcaaaagaaacctttgacagactgcaaacgcacctggaactgaaaggtctgctcccggatgagtatttcctgttctccgatgaactgacgggcgagctgcctgaatttgaccaggcgctctgtattcccaattttggggccagcgaaggtatctatctggacatttccctggcctgccgcgacaaagatggcaagcgctattttcaaaactttgctaccggcaagacattgggagaaactgcggacgactattacaggatgttccgcattgctgccgaatgttccctgatgctcaatggccgtggaaatacctatgaacagaaaaaagtggacatcgttctgaccgagcaagaagcagaggccgtggggactgtggtggatatggaactctgcggccaccatccgccggaggccgaggcaattttgaactctgcgctggagaagatcgaccggattgcctttgcaaaagtccagaccatcacctgtcacgggaaagacgattactctctctggtctgcggaaatccccaaagatatgctgcactccatcctgcacgaagcctgcgaacgggttggaaccctggatgaactgatggacgcaatgaacccgaaggacgggtatgaaatgcggctgttcattcagacaccgggacggcagtttgcgttctaccgtatccctgaacggctctccaatctggaggactacgccaatgagggctgctctgtccgaggaacaaaggacgaaatcatggcggagatttttaccgagtgggcgcccgcccaagaagatctggaagatgactttgaactgtgacagcccgcacttttcttttcatctgtacctgcccgcccccctgcgggggcgccccgcaaccggaatccgcaggccacgccctgcggttctcggttaaggcaggaatagccgtcatacctgacggcgggctgacagcttgaaagccgtgctttcaacggggttttgaggatttcaaagagtatgattttttgattctggtgtgatttttgtcataccgcgctttgtatccgttctacccaccgattctaaccatcctctgcgttagaatggttagaatggttagaatgtgaaaagcattttgtcagagcgccggatgaaccggtgccttttctgctggaaaggaggattgatttgaaggaatcgcccataaaaacagagcgcaagacgctccatctgccggaagatacagttcgggcgctcaataaactggccgccaagaatgggacggacttttccaaagaagtgcgcagggcgattgacgaatatctggatttggaaaccaccgccgaaaatattgacatgataaacggggtcatccggcaggaactcagcgggcagctcaaagccctgggaaatcggttggccggactgataaaccgcctgacgatcatatcggctgcgggctattatgccaacattgccattatcgcagacctcattgaccaagatcgctattcgtcttttgaaaaaattgagtcggcggcccgaaagcgggcattggcatttgccaatcagaaaaacgcggatgcgctgcgtactttcatggatgacgaggaaatgcagaaagccatccatgccgtacaaggaggttcccgtgtcgattctgatttataagcagcgccaccggcaccccaactataagaaaactcccaaaggcaactatgcacatatcggttacattgcaactcgtcccggtgccgtgaagaatgaggggatgcgccacggactgtttggcaagctggagccgggggcggtcaaagagtttgacacttggcaggaagccgcccgcctggttcgggagctgtcctatcgccgtgtcaatatgtatcggggaattatttccttttcgccggaaacggctgccgaattggggctgtccgatcacaaagcgtgggaggactatattgaccgccacattttgacccttgcaaagttcaatggaatccgggtgcaggatttgcaatgggtggctgcccaccataacgaaaaaggtcatcctcacatccatgtggtgttttggaataaacatcagcgaacaatggtcccttttgtccatccaagcatcccggataaaatccgtaagcagctcattcgggatacctttgccgagcgcatcaaggcatattgcgaggacaaacagcaggccaaggaacacctgtcggccatcacagacgaaatgatcgacgagtttgaaaagtatatggaacagcttcacccgcaggaatatcgccgcctgcgtgaagcgtttgggcgaatcacggatgatgaactggggacttcccctttggacagcgttgttggtgcaatgaagatcgccccctttctctcgcgcctgttcgcgctgaaggagaaaatgccgaaaaagggacggctgtattacaaattgctgccagaggatgtgaaggtcgaagtggatgcctttgttgccttcctgaaagaaaacaacgagtacatccgcaatctggttcaggactatgcagagagcaagacccgtcttgccatgctctatgacaccgacccggcgcacatcaaagaacagcaggaaaaggctgtggcggaggccgataagctgattgccaataaaattctcgacgtgatccgcaccatgctgtgcaaagaccgtgaggtccagtcttttgaatatacagaggcccggaaagcctacttcaccgaacagatgatttgcgaaattctaatagcgctggagcaggctgctatgagttttgacatggaatacgacgaccggcaaaaggccatgagtaccgaactgtcaaaggcggcccgaaaagagtggtatctgcggcataaggacaagggggtggaaccatagcaatccgcaaataaatgtattgtcgaaaagttttgcgattataaaccgcaagactgattgaccacctgtgcgttttgcggtataataatagcgaatggaggtggtcacgatgattgaaagaccgttatatgtggataagattatggcctatgtagatactccttttgttaaaatccttacaggggtgcgccgctgcggaaaatctaccatactgaaaatgattatggaaaggctgaaaacggaacgaaacatcccggaagatcgcattataagctgtcgttttgattctatggaatatgaggatatgacggcaaagcagatctacacgctattgaaggatcagctttcctccacaggaaggacttatctgtttctggacgaggttcaggaaatcagaggctgggaaaaggtcgtaaactcactggcatccgattttgatgttgacttgtatattacaggctccaactccagaatgatgtcctctgaaatagcgacctatcttactggccgatacatttccttccgcatttttaccctgtcttttggcgaatatctgatgttcaaaagcaaattcgccaatgttggggagccgaaagcagaacttgccaattatgttcgcctgggaggatttccggcaacgcatttgcaggcgtattctcaggatgaaatctacacgattgtccgggatatatacaattccacgatcttctcggatattgtaaagcgaaatcaggttcggaagatcgaccagttggagcgtgtcgtaaaatacacatttaataatgtcggcaacaccttttccgccaagtccattgcagattacctgaaagcagaacggcgatccctcgacaacgaaacggtttacagctatttggaaaagctggaaaaggcatatctgcttcaccgctgttccagatatgacttgcaggggaaggaaatcctgaaaacgcaggaaaaattctatctggccgatgttgccttgcgatacagtgttctcggctataacgcagacagcgttgcttccagccttgaaaatatcgtatatttggaactctgccgacggggatatactgtcaatgtggggaaaaccggagatagcgagattgattttgtagcagtcagacaaaacgaaaaaatttatgttcaggttacgcaggaaatcaactcagaaaagacagaaaagcgagaatataaccgcctgcttgaaatacccgacaattatcccaaatttgttctcacaacagacgaatttgccggtgggaactatgagggaatcaagacaatgcacatagcggattttctgcttagtgcggagtattgacatctgaaaaaattgatattgccatacagaaaagcagtcctgcggggctgctttttctgttttcaaatgattgtggaaatcaaaaagtgaccggccgcccggttccagaaaggagaaaggatgatagcagcgaacacttcctataagcaaaatggtgtgccggtgtcgattccgagcggttcgtatggcattgcccatttgacggttcaccaatatgaataccccaaaggacatccctgccataactgcccttataccctgcgcacctctgtcccgtcctgtatgttccctgaacgaagggatggcggctgtctatggtacgatctgaaaaaacagcggcgccctccgctgcctgcggtttaccccaaaaatcaggcggcggcagagcgcatttttgctttcgttgaagttctcaaagatgtgatgaagcgaaaaggttatcaggaaaggaggaaaccgattgcgaagtaaaaccgatttttacaggctgttctttgagcagcttgcccggcgcggctttgatgtaaagcggtcccaatcttccgattacatcgctgatatttatttcaagaaccagcttgtggcctatttctccaaagccgatacggtgatccagaacccctttgtcacagtcaaggacaaactcattcgccttatcaacgatacggcccaggacacggcgaacaaagcgggtatctgccgcgactgtccttatactgacgccaatgagaaacttcccaatggctcttataagctggcagaatacaatggcgtgactctcgcctgcaaggaacatcatctgtttggctatgtgttctccacctaccgcaccgccccggattccggcgaaatgatggcccgccagattttttacaacaaggaatttgcaggacaggatttcgccaaacggagcggtttggtggatgaacgtgcgctgttcaccgaagaagaactccgggtccttcatgcgggcttagttaagatgagcatactcgatcaggatgtttccaacgaggcccgtgaatctgtggaacggattcttgacaaaatcgaggacattatcccggagctgcgggagcaggaaatggagtttgactttgatatggagttcggccagcaggaagaaatggagattggaggatagcaagaatgagtagcaagaggaatcagaccatcgctatcgcccgtttcctgatgtataaatacgggctgaaccagcagcttgagggcatgacggacgaagaatacctggcgcatcccattggcttggaggtggggcaatatgtagctgacctgatgaaatactgcccggagcatatcgtcgatcaagtcatggaacatcaggatgctcttttgcggcgcctgggtacggattacctcaccgtcatagcctatatgccttatgaggaagatggagggacaaagtatgcgtgatggacgcccgaatcccgatatttggggaaatatcatcacctgcggggagattgccgtgggcatttatgagattgtcggcacaaagaaacgtgggctggaagtgccgaaggctgttgccgaggaaattctgccggaatctgtggtggaacaggctgcacaggacggtgaaagcctttgttttactgacccggtttccaacgctatcgttgcggacgccctgctggaacaggaacttgtcaccgatccgcaggcggtggcccgtctggacgcaatccggcagcttgatgatgtggcctatgatacggcctttgaaccgcctgtttcagactatgagctggacgggctggacttggaaagataggagttttcaatgaaaatcctggacttcgacctggaaggaagtcacttcatcatcgaagcagacatttcgccgcgccaagaggcggatgatgatatggagtgtcaatggctccggttcgactttgataacacgcaggtttataaggaaacggacggcgctgtttcgccgttccaaattacagccgttgcttgggctggctatcaactgactgccgatcatgcgttgaaagatgtgatcggacgaatttcccgcaatgaaaccggtaagctgaccgtgcattatatctgccctgaacttcaagaattttttgatgaactcaaaaagtatccggctatcagcggggaacgaacgattccatatttcatttttcacgacggcgacattgcaagactggcctatgcgaccaatgagtttctgtattacgaggacagtaactatatgccgctgatgttccgtaccgttgacggtactcttgtttccgataatgaatttgccgatatgggcctttatgaatccgaggaaaatgttgagaacggcacagaacacattttgccgttcacagattacggttccgatgtggaaagcgcctgtgatttagaggacgaggaagatctggaaatttgaaactcagaggtttgcgggctatgttccgtggccggtgggcagttttcatcgacttttgcaccgtccatctgttgggtggatgggcttaatttggaaaggtaggtgttactttgaggctggtctatatttcttcccctctgcggggagatatggaaaagaacaaggaaaaggcaaaggactactgtgcttatgcggcatcctgcggcgtgattcccttggcgccgcatacgattttcacgcaatatctgaatgatgcggtgccggagcagcgggaacagggtctgcgaatgggtcacgaactgctggagcgctgcgatgaactctgggtaatgggcgacaccatctctcagggaatgaaggacgaaattggcctggctacttttttgcaactcccgattctctatgtatccgatgatatggtgaagaatcagaaaatgatccgccagtcggatcgccctctggacataaatgactgcatccccgacagtagccagtacaactacgaaaatcaatttttggttctcaagcctggggtgagcagcaagggcaaggacatgactgccgacgactccatctggtatgcccgtaacggttttggatgtatttatggagccagaggtcaggccgtgtatgcggaaagcctgttgaccggcaaatacattcattgggaacgacatgacttctgtggcatcgtcaagccggaaagcttgaaagaatggcttctggataagccggtcaggaatgaggctgccgaagaactcaccaagtttgtcacccctgaacttataagcgcagccaagcaaaaccatactgcttgcggctatccttttctaatcgggtatgcccctgcggagggcggtctgcatgaagcgttctgcctggaccccgatccggtcaatcttgcatcttttattgtgaagatggggaaagagcgcggcgacctgatgatttgtactccgttggataccccgtttttgaacaccttcgggacattcattgaccgctgcgcggatcaggactttttgcaaaagcatctattgccggtcctgattcccatgcagatgggcgaaacggagccgcaggcaatcaagctgactgaggatcaagacaatgaagcgtttctggatgattttgctgttgaggatgatatggaattatgaaaacaaagcctaaattgatggtttgtgcgctgatcttcgtttccggcgcgattctcaacctgtttttctcaacagcggttcacggtctgctgacaagagagatcacccggctttcacttctccccatcggggactgccttgccagtctgttttccagccgccagcacatgatgttgtatctgtgtctgcaagggtttgtaagtgtgttggcggttatgttcttcctgaccaacatgaggccgtatgaatcagacctggacacgatcaccccggaaattcagacacccagagccgtgggccaataccagcatggttcagcccggtggatgaccgattccgagaaagacaaagcatttgacagctatattcttgacccgcacaacccaacgatccggcagctcttagataccggatacgatggtttggattttctcaaagaaaaataaggaggcgataaattgaagttgaaccttcaccccaaaggtattcccaagcaggaacctttgggagcggatactccgctaaaaaaaggcggcgtggtggtaggtatgcgaaaggagggtgataaagaaaaaatctattttgtcggtgatgactgccacctgctctgcgttggcgccactcgttccggtaaatcaagatgtctggttctggaaagtatctgtcttttgggactcgccggagaatccatcttctgctccgaccccaaagccgaattgttccactacaccgctgatttcctgaaaaagttgggttatgaggttttggtgctggacttcaagaaccccgaaaagagtatgcgctacaatctgctccagcccatcattgacgccatcagtgagggagacaccgaccgtgcagaaatgctggcctgggacttgacgaacaatctggttggtaagccggagggcgaaaagatttggacgaacggtgaatgttccatcatagcggctgccattctttgcgtggtgtgcgacaaccaaaaacgaccggaatttcagaacatgaccaatgtgtattggttcatttcggaaatgtgccgtaccatcggaaataagatgccgctgttggagtatgtcaagaaactctctccgtcccacccagcacgggcgcttctgtccatttccgatgtggcgccgtcccgtaccagaggcagcttctacacctctgccctgaccaccttgcggctgttcacctcgaagtccatctacgctatcacccataccagcgattttacccttgcagatatgggcagtaaaaagcaggcgttgtttgtaatcctgcccgacgagaaaaccaccttttatcccattgcttctctcattgtgtcgcagcaatatgagcttctggcagaggcagcagacaggcgcggcgggcgtctggagcgccgtgtcaacttcatccttgacgagtatggcaacttcactcccatcagcgacatgaccaacaaactgaccgtggcggctggccgtgggatgcgatatgcgctgtttgtgcagggcttcgaccaactgaaagaaaagtacagtgacaatatcgccaacacgatcaaaggcaactgtcaggtatgggcgtacctgcaaagcgatgacccggaaacgctgcgggagatgtccgacaaactcggcagctacaccacatccagttaccagctttcggccagcaacggcaaatacacaaccccctctaactcccagagcgtcagtctgaccgagcggaagctgctcaacacggatgaggtccggcgtgtcaaacgtccccatcagattatcaccagccgcgaccatcccgctatgatgtatgcacccgacctttctcaatggatgttcaacaagatgttggggttgggtgatatggagcataaccgcaggctgcgggaagaacgggaacagaaacggccaatcatcaccgacacgaaacaggaaatcgcattgtggaacatctggatttactaccagaaagacatcatgcgccgccttgcacagcaaaagggcgctatgggcggcggccttgatgatgattaactcataggaggtcttgaatgaaagagaaaatcaaccagacggcgggcaggctgaaacagactgtccgggcggcaggtgctggaatcgccacacttgccgcctctttttttatgtccgcaccggcctatgctgccggtgtgcaggatagccagatcgtcaagggaaccgagcagttgatcggtgatgtgacgacctggctgatggtgctggcgccggttgtggccggtctgcttatcatctatttctgcatccggcgcggcatggctgacgagatggatcagaaaaagtggaacaaccgcattgtggtggcggtggtgtcctgcattggcgccgtactcggttccgccaccctgaacctgattctcggctactaccagtaagccgggatacattccgtagtacaggcgatttccgcgccttgctaaataaatcactttattaacaggaggaaaaaactatggctaacttcatccgcaacactcaggttaaggctatgacttctatctggactgccaagcagaaggcccgtgagctggccgaccgcacggcggcggcgctgaccgaccgcaccggtcagggtacgctggatgtggcgattactgtgctgatctccatcgtcctgggcgccctgatcctggccggtctgtacctgatcgtggacgacaccgtgctgcccaccatcacccagcgcatcaaggatatgttcaactacggcggctgatcggaacaagcagcggcggggccatcggccccgccataatttttgacaggaggtttttcaatggagttcaaagcggaaatcaaaaagacttttaccggtcccgacaagctgcgggcggtgtgcagcgtggtcctggatgactgctttctggtgaagaatgtgcgggtcgtcgagggcgaaaaggggctgtttgtgtccctgcccagccgccggaatgtcaagggcgagtgggtggagcattgcttccctatgacgaaggagctgcgggcgaagctctccgctgccgtgctggaagcgtatgaggccgccgtgcagaacgaggaagctgctgcgtcctgattactgccccatattccaatccctattggggggcggccgagcgccgcccccagaaaggaggtggttgctgattggaatatatcttagtgctgctgattgtggccctgctgaatggagcaatcgcctacattgatgggctgatggaagggatcatccctcttaccctgtatgcagagcagtatatgtccactttggccggggttgatctgtttcaatccctgtttgacattgtgttcggctttggtgtgtccctgattgtgctgaagttcctgaaaaaaggctttgaaacctatgtactgtggtcggacggggatgcagatgaagaacccatagccattctcacaaacttcttcaaggcaatggcggtagcaatctgctttcccaccatgtatgactggcttgccacgattgtagaggaaatgagcaataaaatgttggaggccatcggccttgccaccgcttacgattgggctggctgggtatccggcatctcgacgatgggacttgtgacggccatctttggtctggtatttgtcatcgtctatttcattctgtatttccaattcctgatgcgcgggcttgaaatcctgatcttgcgagtgggcattccgttggcctgcgttggtctgattgacaatgacaaaggtgtattcaagccctacatgagcaagttcttccagtctgcgctctctgtggtaattcaggtttctcttgcgaaattgggggttggcctgatgatgaatatgcacatcttctggggcgtggcctgtatgattcttgcggtgcggacaccgaagttccttcaggacttcctcattacgaccggtggcggtggcggcggcgccattgtcaacaacgcataccattctgtacggctggtgcagatggtcaagggcatgggaaagtgaggtgatggccgatggtgacaatggacgatatttcaaatgccatcatcctgcttgtgcgtgttggtgcggtcgcccgtttcatctactgcctggtgcgtttgaccgcagccgaggaacaagcagcgcagtataaaaagcgcgcccgcaacacggtgatcttctacatcatcgcagaatccatctggcagatcaaagacctgattctgtactattattcctgacaggaggtgcaaatggacgaagatttgaaactctacatccctctgggcgtgaagccggaggccgaactgtttaccggctttgggaaaaagcagctttttcaatccattgtggggtccctggtgatgggcggcatagcggcgctggcctggctttttaccggcaatgtgaccactaccgttatcctggccctggccggtatctttggctctgtgatgatgactaccaaagaccagagcaatttgtccgtggtagatcaggtgcaaaacctgattcgctttttacgcggacagaaaatctacccgtatcgttacggggatgaatgggggcttgagtgatgtacgcaaccattccggtctactacccctcgctggaggaagccgcccgaaaggatgaagcggctctctggtgtgacagctacaacatcaatatgtcctgccgcaacttcattcaggataaggccatgactgcctttaatacccgtgaactggacgcctttattgaagaattggtgcgttgttatggaacagagcgggcgatgtatgtgctgtcccgtaccatccagttttccgattgggacgcgcggttcgatcaggccgtgcttgaccgagcgggcaaaacggacttccccgacgcaagagagccgagggaggcacatcaggtagacccgaccacccgatatgtcacggagattgatccgtgtgttgtaaatgccgtctttgtgaagctgatggagcttgaggacgaacaggaagaaaccaaccacatgaatgaaatcgagcaggatgagcttgacgaggatatgacggcagaactgtgaggctgccgatggagcagatgacatttctggatttcttcgcaggcatcggcggtttccgcaagggctttgagctatgcgggatgcgctgtgtggggcattgtgagattgataagtatgccgaccgcagttacagagccattcacgatgtaaaggaggatgaatggtatgcagccgacatcacaaaagtcgcccccgcagatctccccagagcagacctgtgggcaggaggattcccgtgtcaggatatttcggtcgctggccgccagcgagggcttgacggagcaagaagtggactcttttttacacttgctcacctcgtcaaaggccaaagtcctgaaaatcgacccacatggattgtccttgaaaatgttaagaatctcctatccattcatggaggatgggactttgcgaccgttctcgatacgctggcctcactcggctatcgtatcgaatacggacttctcaatacaaagtatttcggcccccctcaaaatcgtgagcgagtgttcattgtcgcttgccgacatcctggagccggacgcggacccaaaatatttcctgtccccgcaggcagtggcaaagctcttatccaactcataggcggtatgcaggggcagcgcgtctatgacccggcaggcatcagcgtaacaatggctgcacagtctggtggctggggcggaaagaccggtctgtatttcgttgacctttgcaacggaaatcccaaactgaccgaccacgcccgttgtatcaaagccaagtattacagcggtattaccaaccgtggcggggacaattccggtgtcctgatctctcccgcagggatggacaaggatgcggttctgtcctttgtggacatttgcaccgggaaggcgaaactcaccagagaagcccgttgcatcctctccgcctataaccgcaccatcagtaattggggcggcagttccggggtgttctatggctgccgtgctgtcgtgaccccagatcgggaagaaaaacggcaaaacggacggagaatcaagaactgcggggagccgtctttcaccgttacggcgcaggatcggcatggagtgctatttcaagactgcgatgagtgtccctacgggatgcagattcgagaagcgacaaagaaaggatatgatattgcccgctgcggcgacagtatcaacctttctttcccggagagcaagacgcggcgcggacgggtcggcaaagaccttgccacgacgctggaaacctcttgtaatcaaggcacagcttttgccgggtgcggcctgatccgcaggctgacgccccgtgagtgctggcgactgcaaggctttacggacgagatgtttgataaggcacgggcggtcaacagcgacaatcagctataccggcaggccggtaattccgtgacggttcctgtaatctacgccattgggaaacaaatccttgccgcacagaaggcattggaatgtggagaataagatgtttcagaaaaattggaacccgtggcccattttcatcggcatggcggtcgcaatgaccgccatcgccgtattctatcgacaaatcatgtgatggaggtgattcatgctggaaactgacgcattaaaagaaaagctggagatggaacttcatcgctttgcccggccgccggaggaactttcttccggcgatccgtattttgagcagcttcagaccatgctcgcaatccgagatgaactgataaatattccgctgtgtgatattcagcggaatatgctgctttcgatggaaaatgtattggaatcggcatggtcattccgcaacacacccgtcccggatcgctgcatgaatccgaacaatatcagcgaagtggtgtactacttccttcaggacaaaggcgctgagtaccggggcgacctgctctatgaacgggccaaagccgagtttgatgcccgtatggaagaactcgccgccctgccgcccaaagaaattcttgaccacgcttatgagaaaatcatcaaagaagattttctctgccatctggaggaagggttggacgagtgggaaacggacgctctgttgtcttatccgcagcctttgacggctctctatacggaatggatgggaaatgattactcctatctggacatagaccgaatccaaagcacggccacacaagcggcgggaaaacggttaaatgaacttcgccgccatgagtttgacgtcaatggtgagccgcccgtggaactacggtatttctatgatttgcatagcgagatactggacaacccagatctggagtgggtcggtgatatggagccatgaatcctctgattgtaaaaggcgtggtatttggcctgctgttggcttgtgctgcgctctgggatatgaaagaacgagagattcccaatctgattcccgccatgattttagtctgtggcttgatagagctgcgccccgccgcttctgtggcggggcttcttgttacgggaggcccgtacctgttggccgcattgctgacacatgggaaagcccttgccattggcggcggggacattaagctgatgggggcttgcggctttgtcctgggagtgtggcctggtctgctgcacagcattttatctctgttcctggccgtgcttacaggggtaatgctgtttgggtttcgcaggcaggacttttcttccatccggctaccccttgccccgtttttctgcattggcggcgtaactgcttattggcttgcggctgcggccgctgtaatttgaacaaatggaggtatcaacttgaacaagaatattttcaggaaccggacgatcatcggtgcggtttgtatcctgctggccgtcctggtttgctttggcatcacgccccttttcaatgcgggtttgaaggcccagaccgaagcggtacgggtgaaagccgaggtgattccccgtggcacctatatcacggcggatatggttgaggtctacaccagaggcgcgtccggtatgtctgacgccattgccacatcacttgacgaggtagtaggccgatataccgatgtagagcttcgcaaaaacacagatgtaaacaccggctggctttcttctgaaccgctgactcagtacgagtacctgaccaagctggacggttccaaagtggcgatctccgttaccattcccacctttgccaaaggtggttccggcaaggtggaagctggtgacatcatcatgctctttgcaaccgataaggacaccggggaaaccacccagcccccggaactcaagtatgtagaggtcctggccgcaacacagagttccggcgccgacaaggaatatcaggcgccccaggatgacgaggaagaaaatcccgaagaatcgctcccgtccaccattaccctgctggtaaataccgaacaggcacaactccttgcgcatttggaggaatccaacagtctgcacctggcgtttgtgtaccgtggaacccgtgagaacgccgaaaagttcctggcagctcaggatcagttctttgtggagccggaggaagataccgcagctcaggatggcgaacagggtgaggtatccggtgataacaatgtggccgacaacaccggtgataatgcggccggcaatgaacccgcagaggaacaggaggttgagaataccgatggcgaataagcagaaacagatgcttgctgtgtggggcagccctgggggcggtaaaaccgtaactgcggtcaaactggccctggaattgtccaagcggaagaaaaatgtggtgctggtgtttaccgatgtgacggcgcccacgcttccggctgtggtcagcgagaagaaactgccggatgtgtccgtaggcgaactgctggcggctcccggaatgacgcaggaacaggttctcaagacctgcgttccctgtgagaaaaacccctatatcagctttctgggctacaaggccggtgaaaatgtctttacccatgcggagtacagcaaggaaaaggcggtggatatgctggtcctgctgcggcacatcgcagactatgtgattgtggactgcaccagccttttgaccggcaatgtgctggcgaccaccgcactggaggtggcggatgatgtgctgcgggtgtgcagctgtgacctgaaggccatctcctacttctcgtcctatctgtcgctggttgctgacagaaagttcaaaccggaacagcacatcaaggtgctgtccaacacgcgcccctatcagggcggcagcgaatacgagaactcctttggcggtgtgaaataccggctgccgtatcttccttcgttggaggaacaggcggcgacgctgaaactgctggaaccgctttccggtaaagaggccaagacctatgagccggtcattgccgctattgccggggaggtgttcggagatggcaagtaatattgacctgttcttcaataccagcaggaacaagcggacatttcccgaagtgctggcggagattcaggaatatctcgccagcaagtattcgaccctgattaccgataacccggaggagcagcaccagcagatcaccgcatacatcgcaaagtatctcaacgattacagtctgggcgttgagggcatgagccatgaggaactgatcgacaaactctatacggaaatggccgagttctccttcttgacgccctatcttttcgcaaatgatgtggaggaaattaacatcaattcgtggaaagatgtgaaaatcacttatgcagacgggcgtgtggttcccaccaaagatcggttccagaccccacagcacgctgttgatgtaatccgcagactccttcataagtccggcatgattctggataacagtcagccgggtgtggtgggccatctctccaataaaatccgtatcacggttctgggcaatccgctcacggacaaagaaaaaggtgtggctgcatccatccgtatcgtgaatcccaagcagttgagccgtgatgatttcattggctacgggacagccaccgccgaaatgctggactttctggccgaagttctccggttcggtttgtccatctgtgtgactggttccaccggcagcggtaaaaccacgctgatgagctggattctctccaccattcccaacgaaaagagaatcttcaccattgaaaatgggtgccgcgaatttgaccttgtgaaagaggatgcagacggaaatgtcatcaacaatgtggtccataccgttacccgtttttctgacgatcccaagcagaattacgatcaggagcgccttttggagtttgccctgacctgtaacccggacattgtgtgtgtcggtgagatgaaatcggccgaggctttcgccgcacaagaggcggcccgcaccggccacgcagttatcaccaccacccatgccaatagctgcaaggctacctattaccgcatggtaacgctgtgtacccagaaatacgatatgggtgacaaaaccctgtataacctggtgacagaagcgtttcccatcgttctgtttgtgaaaaagctggaggacaacagccgccgtgtcatggagatcaccgaatgtgagattctggaggacggcacccggcagctccacaccctttaccgctatcatgtatcggaaacctctatcgaagatggcaaggtaaaggtgcatggcgagtttcaaaaggtatccacgatctcggccagcctgcaaaagcggcttttggagaacggtatgccgccccgtctgctggagcgtatcgccggtggcggtgtaaaactggataccggaaaggaggaaactgcgtgattgtattgattttgctggcctttgtcgggatgctgaccggcatcttcttgattctgggcatgaccccctttacatttgcagaggaactgaccaagccgctttccgggcgccgacagccgatttccaagcgaatccagcaggtcaaccaccccaaagagccaaagggcatccgtaaaaccgtgcaggaagcacgggagatgttgatcctcaccggaaagggtgggaagtttgccgccgtctgcgctttctcgctgttcctggcggcaatgggcgctgtgatctgtattgtaattcagaactactttatgctgccggttttggcggccggaatgggcttgctcccattctggtatgttctgttcacctctcacagctataaaaagctgatgaacaacgagattgaaaccggactgtccatcatcacaagttcctatctgcgcagcgagagcatgataaccgctgtggaagaaaacattcattacctgaacccgcctgtggctgatgtgttccgaggctttttggccgaaaccaatatgataagcgccgatgtgaaacaggcgctctccaacatgaagcccaagctggacaactatgtgtttcgggaatgggtggatgccgctattgcctgtcaggacgataagagcctgaaaagcacgctcaccccgatcatcgggaaactttcggatatgcggattgttgcagcggaactggactatctgctttatgagcctttcaaggaatttatcacaatggcattcctgctcattggcaacatcccattgctatacttcctgaataaagactggtacgaggtgcttgtgaatacgggctttggcaaggggattctggcggtctgcctgctggtgctgctgatctcctttgcggcggtgatccggctcaccaagcccgtagaatacaagcgttgattccgtcaggaggtgataccatcgagagtgctaccaatctccctgcgggacgccaatgcgtttgttctggcgcatcaccggcacagtgggcaggtgcgcggctgtaaattctgtgtggctgtcgtagatgatttggatgccgttcatggagttgcgattgtggggcgccccgttgcccgccgactggatgatgggaaaacagcggaagtgacccggctttgcaccgatggtattgccaacgggtgcagtttcctttacagccggtgcgcccggattgcgaaactgatgggctatcagaaaatcatcacctacacccttgcaaccgaaaacggagccagcctgcgggcttccggctggcaatgtgcgccgggactgcgaggcggcgggaactggaatgtgccggggcgccccagagccgacagccgcaacaccggccccaaacggctctattacaaagaattgaggtgacgcgagttttgtatctcattttgctatgctttgggacgctctttggcctgggagcgttctttttattggccgggctgctccggctgccgacttccgcaagcacaaaggcggttctgaccgtaacgagtcgagggaagtcccagaaaggcagcatcaacgctgtcctgttcgatatggctgcacggctctctccgctggtacatctggacggctataagcggaagaagctggaggcacagttgaaatccgccgaaattaaaatgtccccagaaacctatattgcggcggcctgggtaaaggctggtctgattgctctgctgataattccggcccttctgattttcccgatccttgcgccggtcattgtgtttctggcggtggcagtttacttcaaagaacagaaacgagcggacgagatcgttcagcagcgccgggaagaaatcgaagccgagctgcccagatttgtaaacaccattgaacaggaactccgggcatcccgtgatgtgctgaacatcatgaaatcctaccagagaaatgccggtcatgccatgaagcgggaactggaaatcacgattgcggatatggcatccggcaacgaggaaaacgcactcacccgcatggagagccggattggaagtaccatgctgtccgatgtggtgcgcggcttgatctcggtcaagcgcggtgataacggaattatgtatttccagatgctttctatgaccttcaagcagttggaacttcaaaaactgaaactggaggccatgaagcagccggggaaaatgcgtaagtattccttcatgctgctgggctgtttcctgctgatgtatctgggcgtcctgggctatgtggtgttggaagcctttggcgatctgttctaaaggaggtggtgaaaccgtgaaacgacttctgaaggacaaacggggtgagggctttgtggatgtgtgtgtcctggtcctggcgattgcaatggttctggcgttggtggtccgcattgcgccggtatttgtggcaaagcagaaccttgatgtctttgcagacgaattggttcggacagcagaaatcaatggtcaggttggctctgccaccagcgcaaaagcggcagatttgcgggatcaaaccgggcttgaccccaacatctcatggagcgacaccggaaaaatccagcttggaaatgaggtggaagtgaccctcacaaccaccgtcaatatcggactgttcggtgagtttgcatcctttccagttactctgacagcaaaggccagtgggacttcggaggtgtattggaagtgaagaagattcgagaagtcctgaaagacaattccgggcaaggcgtaccgatgattttggccgttgtcctctgctgcctgattctggcctgtgtaacctttgagtatatgcgactgatgatcgttgcacagggggtgcgcgattctgtccagtctgccattgtggatgtggctaccgagaactgggatgaagcctatgccggtttgcgggagggttactccggcggctatcagctttccggttcgtcctggtcacagaatgttaccagcggcaatgtgtatgcccgcctgcaaaatgttttgggtgttgaatacgagggcgggcagtatgtaaagtacagcggcgaggatttggagtatcgactgtacgatctgcacctggaagtggaaaatgctccgctggccccatctgtgccggatgggattacgcagctcaatgtcacaggaacgatcactgttgatgtgccgctttcctttgggttcgggcatctgccccccatgcagatcaccatgaaactcaacgccaaatatgttcccaggttttaattttgtgtatttcgccctgtcgcttttccatagcgcaaaaaaatatttggcaggaatcacacctggacgccgtatttgtgcaaatggtataatgatggcgggaaatattaccgtcgttttaatataaaattaccgtgcaaggaggttttcaaatgagtgctaaaaacaaaaagctgctggccgttctcggcgtagcagctgttgtggtaattgtaattgccgcagtgctgctgggcaagggtgggcagaccacgaccgttgatccggcatccactccctcggatgtatctgccgaggatgtggatagcagcaataccccggacggtagctccagcgaaccgctggtggtggtgccggacgcctcgaagcccgaagctactgacagccagaaccagacggacgccgttttgaatgtagaggaagaagatcaggtggatgtcaacctgaccgacagcgaaaagaagcccgaaaccactccgcctccggcgccttctcaggaggaacagcaggcggccagcgaaaaggatgagccgattgtgcatgagccgaacagcaaccagcctcagaccggcgacacgcagggaggttccatctatctggagggctttggctggatcaccgatgagggcggcggctctgtccagcacaacattgactctgatggagatataaacaagcaggtcggcaacatgggctgataataaccccggagagtacggtagcgataccgtactctttttttgccctcaactaatttgattggaggtgcgtttttgaagcggatatttataatattgctcacacttgtgctgctgttgggtatctgccctatgagcgccctggcagaaaccggaggaagcggaaacgtggatggcggtggcggcgatatggggcaaggaacctcgcagaactcctggaatcctggtatggatggtgtgcggattaccgtggttgacgcagaatccggtcagcctgtgtcgtcctcttttgatttgaccaacaaatctccatctatcaaggttcattttgggaaagtcagtaaaattcaatatgcgaatggggcgagtatttctcccaccacggggaattacgactactataccccggcaacccctatgccgagaatcatcagcagcggcagtcagagcgccagcattgaagctatcaagaaatacttctgctccgagtatgcggtaaaactggtggcacagcagaccggaatcgcatacgaggaactgatcggcggacagtacaagctgtttttggagccaatcgcctatttcaagcacaacggaattatgatggcaatgactgcccatgaagccgcgctctatgataatcaggcaggcgggtccttgcgtaagaccatgacgagtttgactcataaaaacctgccgctggctatgttcctggaatatgcggatatgggatttccggcctatacaggggctaccaataagacctgttccaacgatactattatcacctatctgggcatgggtattgtatggtttaccgacccgcccgaacagccggagccaaccgactatgactatgagtatcgggtggatacggatgtcatcacgccggtaacactctatgctggttcggagatcaatcctgacagtccggccacggtatccttcacgatcaacggcagtacctaccgtatgaacaatattgtgattccgtcgggagacagccagattgcatgggtaaagtggcatacaccgtcggagccgcaggacattaccatctatgtcagcaccaataaaggctcgttgagccaaagcaccattcaggcaaaggtggtagatctctccggcaacgacccgcccgacccgaaagccaccgatacgatgggaagctggacggccagcagcgttcccagccgtgaaaccaagacctatgctgcttggagtgtctggtgggcgcggtggcacccctattgggtgtggcacagcaccggtgatgacgatggctattgggtggacgaaggatggtatgacttcttccgggacaattactccgccagcatgacagccactacccgaatcgagccagacgaaaaagttcctaccgcatcgggcgatttgatgaagtcgggttatggtgtaacaaatactgttacggcaaccgtcagtacctctgctccgctgtcgcattatacctatgggcagacagccgtatcctacttcccggagtttggctatggaacctattggcggctgcttgaacggctcaccagcggaacaacggcgcggttccagtttgccaaaaacatttacagtacctacaaccagcgggtgcatttttcgccggtttggttcccggacgggagctacacggtcaatactcatgtgatagatatttggacgcctgcggggatgctcgccatgaatctcaccgatgatgtaacgatcagcggctccctctatgatgattggcatatcgcaccgggcaatccgtaaggaaaaggagaatggatatgaacgacaatagaacgattcggattatggtgtttgaacctgggcgggcgccttatacgaccatgctggaggattctctggaacaccggcaggaacttgtgggcggggatattgagtgtattcctctgccctgcgaaacggttctctgctgcaatgcgtccgggaaactggcagggctgccggagaaccggcagtacgggccggataccattcacggaacttttttcctctatggcgataccccggaaggacggggcgtttctttgaccgatgaacagatcgccatgtatcaggagtattttccgcagccggtccccgcagcggtatcctttgaagtacggtccgccgccgacatgaaagagtttatgaacctcatgttcggcaagggatgggacatggacaccggagccggagaggatatggaggcaggccgatgagcaaaatgttttcggtggtgactctggacgcccctaactctctgatgacagaacattttgtccccggcagcccggatgggctggatgaactgctggactgtgatgaaatctccgaggccctttcgctgtggcccctgggggacactatcgaagccaaaatccagacctatctttatggagagggcgaaactgtgcgcgccgacgaggatgatttggcattcttccgagagcatttcgatgagctgaacgccagcgacgccctggattgtatctcagaccacagcttttcttttgaatcggacgagttggattttgggtacggcgaagaaagtgaagatgaagaagatttggaactgtaacacatggctctgctgaaaagcagggtctatttttatggcaaagaaagcgaggtcgataaattgctcttgccgattattatgatctgcgtctgtgcgctgctgggcggtgggacgctgatttttctgaagttgtcggccaaacacaaaaaatcgaagaacaaggacaaggaagaactggcccagatcaccgccaacgagtttgtgaatgtgaaggatattcgggggaacttcctctatacccgtgacaatctggctctggcatatctgaaaatctatccgatcagcacagaactgttcagcaaaaacgaaaagcggctgattgccaagcagctcacggtgagcctgtccagcgcacagtacccgtttcagcttttggctgtatcccgcccggtggacatttctccgctgctgtcagaactgtccgccacgctcaccgcttcttccgatgtgaaacaaaaggaactgctaaaacaggaaatcgtggagatgggcgcctttgccctttccggcgaagtggtggaacggcaattctacatcaagatttgggatagggtcagcgatggcgtggagcgtgaactgctccaaaaactcaaactgctcggcggatacttttcggacagcgggattcagaccgaaatcctgcaacagcaggatattgtccggctgtgcaacctggtcaacaatcccgcctatgtccacttggaggattccggcatcaatgccgcgatcccgattttggaaagtgtaggtgttgcctaagtatgaagcacacccggcaggatttgaaaatcatgcagggttggagcctcgaaagaaaaatcagagttacgcagacgagaatcatggaatggtatatgcggtacgatgggcaggtctttatcagcttttccggcggtaaagactccaccgtgctgcttgatctggcacggcgggtctaccctgatattcctgctgtgtatgttgacacggggttggaataccccgaactgcgcgatttcgtaaaaacgaaggacaatgttatttggcttcgcccgcgctatccgtttcctcagattattgagaaatacggctatccgatcatctccaaagagatctcggatgttatcaatggcgcaagaaagggacaaccttaccgtctggcaagaatcaatggagaattgctggacaagaacggaaagaagtcgatctacaactgcgagaactacaaataccttctggatgctcctttcaaaatttcggcacgatgctgttaccacatgaaaaaagcgccgctgaacaagtttgaaaagcagaccgggcggcacccgattacgggtgtcctggcctgcgaaagcaagctgcgggagcaatcctggttcaagtttggctgcaatggcttcgagcgtaaacgaccgctcagtcagccccttgcgttctggctggaagaagatattttgcggtatctgaaaatgaccggcattccctatgcccccatttatggggacattgtggagagccacaagaaggacggcaccccgattttgaaaaccaccggcgtttccagatcggggtgtatgtattgtatgtacggcgtccacctggagcatgagccgaaccgattccagctgatgcaggtgacacatccccggcagtatgattactgcatcaataaattggggtgcggcgctgtactggattacattggcgtaccctaccgcaatcaacagttggaggtggatcattgttaggctctaagaaaaaagaagaagtgcttcctgtcaatgaagcgctgttgaatgtcattactccgatggggctggaaatcaagcggaacagtctggtcatcggtgaaaatctgggcaaggtgtacggcgccatccgctatccgcaaaaggtggatatggggtggctttccaagatcaccaacattcccagcacaatcgtttcggtggggattacccccattgataatggcgcgctcatttccgcaatctccaaaagcattgtccagcagcgtggcgccgctgacagtgccaaagacccgctgacccggcagcgcgccgagaaagccgccgaggatggcgagagaatcatgcagcggatcgaccaggagggcgaaacggtcgccatgatgtcgctgaccgtgatgccgattgcacaggatgaagccaatttcacaaaggtatgccgccgcgtggagagcgccttcaacatccagaagtgcaaggtgcgcacccttgccaatctccaaaaggaagggtttcagagcatttctcccacctatccggccaactccacggtggacagcatcgtgtcccgcattattcccatgagtacctttgtgggcgggttcccgtttgccagctccggttacaacgatggccggggctattattttgcaaaggacagcaacggcggcctggtgattctggacacctgggaacgcgggaacgaccgcaccaatagcagcttcgtgattatgggtgtggccggtatcggcaagagtaccgttgtaaagcacatcatgctttcggaatacatgaaggggacgaaaatcctgtgcatcgacccggaatccgaatataaggatatgtgccggaacctgaacggaagctggctcaatgctggcggtggcaagaatggccgttccaatcttttgcagatcagaccggcgccccgtgacgaggacgatgaaaccgacaagctctataccgatgaaggaaacggaatgtctgatatggcgctgcacatgaaaacgctggagattgaattttccctgtatctgcccagcctgacggatatgcagaaagcgatcctcaagcagacgatcattgaactctacaatcagttcggcatcttctgggaaacggatattcggcagctcaaggccacggatttccccattctgtccgaccttcacgccctgctggaaaagaaagcggaggccaacaaggagaatccggtatatcgtgatctggcaatgctgctgtacgacgccgcagcgggcagcgacagctttctatggaacggccacaccacgctggaggccaattcccggtttatttgcctggatacccacgacctgcaaaatgcgtcggataatgtcaagcgcacgcagtatctgaacctgttgagctggtgctgggaggaaatgagccgcgaccggaatgagcgttgcctgctggtatgtgacgaggcatatctgatgatcgacccgcaggtcccgcaatccctggtgtttctgcgcaatgtggagaagcgggcaagaaagtatgaagctggactggcaatcatttctcattccgtggtggatttcctggccccggaggtcaaaatgtacgggcaggcccttttggatattccgtgctataaaatcctgatgggctgcgacggcaaaaaccttcaggaaaccaaagacctctacaacctgacggacgcggagcaggaattgttggagagcaagcggcgcggacacgcgctctttatcattgggtccaagcggcttcatgtaaactttgagattccggcttacaagttttcctatatgggcaaagctggcggccggtaattcggtggcggccgggagcaatcccggtcgccttacttattccacacaggaggttttcagatgaatcatgcggaacgatacgaatacctggtcaacaagatggctgccatacgttggaggggcagtgatttggatgcttcctactatgccgcccttttcctgatggcttcccatccgaccctttttcagaagatggatcgctacctctgcccggagggaatcgactttacaaagatgatgcggaaagaggagtttgaatatgactggatgaagattacggcggatgccgcccgcaacctcttttcctggaacagcaagtgtgctgctactccttttgagatttcgcggatgcctgccccggcgattcgggcgctctttacggcctgcttcattgctaacggggactacatggtatctgtccgggaaaataacaaaggagaaaaggtgtttgaaattgacgacagcgccggtaaacggcgggaggcgttcaatctgcaaatggagcagatgatgaaagcccccggtatggaaccggactgattatggaggtgattttttggctgttgatccgttgactgcaaaaattttggcaaaggtagctatgcaggcggctaccgactccgagagccggaaaagaatcctgtttatgatcctggccccggttctggggcttttgcttttgattgccttcatcctgtacctcattaccagccccttttctgtgctgtcccaatggttgattggtgatgaggtaaacgtggtagaggattttcagaagcaatatggttacaaccagcagctcggcatttatgagaaagactatatagacggtagtggtcagagctatgagggcgtcatctttacggatggggcaaccgaagttgtctactacaatcagttggatgagcgttgggccgatcttccgtatggaaccgataatatcggcggttatggatgtggcccgacctctatggcgattgtggtatccagcctgacagaccagaccgttgatccccccacaatggcagaatgggcgtatcagaacggctattggtgttccggcaacgggtcctatcactcgttgataccgggggctgcggagggctttggacttcaatgggaaagcatcagcaccgatgacccgcaggctgtggtagacgctttggcgtccgggaaattgattgtggcgctcatgtcaaaaggccacttcacatccagcggccactttatggtgctgcgcggagtgacctctgaaggaaaaatcctggtggccgatcctgccagtaaaaagcgaagcgaacaggaatgggatatatcaatcattctggatgaggccagaaagggtgccgcagcaggcggtcccttgtgggcgatctattaaaggggtgcgatatgaataaccgaaacaagctgattgaactgtttatctacatcgtgatcgtggtggtgggcatcgtccttttgctgaccggcggggcggatgacaaaaccagtgctgaaaatatgagaggtgaatcctatgctgttgtacttgacgagtaaccagaaaagcaacctgatcgaccccgccgtgcggaatatgactctgcccgccaagaaactggtcggccggttcagcctgaaaagcttcgtgaccaaagatatgcgcaattatgccaacgccaaattctttgtggtggatgcggcgtgtatcgaggaaagcggcaatgatttcacccttgccctgcaatcctttcagatgatgttctccgcccggattatcgtcatcctctccggctgcgaggatgtgaacggcgaggtacagcggctactgtccatcggcgttgtgaatctggttacgggtgaaacgatggaggacgccttggacgagctgacagaagcactttccgaagatgggatgcagcggtatgtggtaaaggctcccgtctacgaacagccagtttcccgccacgagaaagccccggagccggacgagattattccgtaccgctggaacgcccggaatatccgtattgccgtggccggttcgcagcgcagaagcggcgtgacggtaacggcctttaacttggcatcttggctggcggccagaggtgcggaggtggcgtatatcgaagtcaatcagaaccgtcacctgcagctcctgctgaacatctacgaggcggcgccggatggggagcattacaccattgatgggatcgactgctacctgaccaacgagccggataaggcgtatcagtttatcatctatgactgcggcgtaatgcagacgcctacttctatttttcgtgacgcagaacaccggctcctgtgtgggagtgtcctgccttatgagattccggtgttccataaggcattgtccgagtgcggatcattggaagtgcgcccggtggcgatctgtgtgccgcaggaaattcaggaatactgtacggaactctttggggaagatgtgcagattgcggcggcatcccacgacctgtttgcgaaacaggtcaacgggcagatttaccggccgctggtggagaagtatattgcaggagaaaagcgcctgtaacagtgagacatgactgggaggattggaatatggcaaagtttgagtatatgcagcgggcattttcttctgaactgaagcccagagcgcggcttgtactgcaagtcctggttctgcattgcaacaaagagggtgagtgtttcccctctatcaagaccatagccgccaagtgcggctatggggtgtccactgtaaagcgggcgctggatgagctggtgaaagcgggatatatcgtcaagcaggcccggtttgacgagcgtaagaacggcggccagaccagcaacctctataccttatgctctgacttgccctgccctgacgagccggaaaatgtccctgtgccggaagatgatgcgtctgatgaatccccggcagtgcaaccggaaagtgctcctgcggatacctgtgacgcccctgatcccacacctggggagcagtctgccactttgccgacagcggattcctactcctttgcagatggctttgaaacaaaaatcgggcggcagaattgccgcccgattcgtatgtggactggggggcagtccatttttatacccccttgaaccgtacaggtgaacagatacttacggatgaagaaaaaagtaatagttatttagaaaaattgcaaaaatagacgaccatgggtcgaaacccccgccgtcagtccttggattgcagtcggttaataaagccaattagcataatcagatcttcgtccttgagttttcgcattccgtccatcgctttacggattaactgtggattgaccgcttctgcatcaaaaaactgcaaaggggtaatctcaaagtaatcacaaatttttaagaactgagccattgacggaagagatcgaccagatgaaatcccctgaatatagctccggttctgtcctaaagccaaactcatttgatattccgatgcgccttttttcaaacgcaattcggtgatccgattgcggataaattcttcatccatatcctcacctcgctatataaaaggataacagatgaaatgcctggattataaacatagtatgtgttataataatggatatatgcctatttgcgccgttttatttgcgttatttcatttttgtttgcgtgagatttgaagtggggtgaagtttttgaaaaaaacatacgcttgtgccattactgggcaccgtccaactcgatttaagttcaagtataatgaagggtattcgttgtgcaaaaaaataaaaaaagcaatgctaaaaacattttgtcatttgcatgatgaagaaggtattttccgcttttatgttggaggtacattaggggtagatatgtgggcagccgaacaactcttatatctcaaagaacaaccgggatatcaagatattgagttaattgttgcacttccatttgaagggcatgattcgaaatgggatgcaatgagcaaacagcggttgcagataattattcataatgccacaaaatgtattgttataggacaaagtggaactgcatccgattataaaaagagaaattattatatggtagatcatgcagatttcttgctggcagtctatgataacaatcgtaaactacgatctgggacaggccaaacagtaaattatgctttgaaacaaaatcttcgcataatttttctccatcccgatacagcagaaataagttaatggtttagttagttcataaaaaattttcaaaatatagttgtatatttttttctgtgcagttattatataaatactattttatgattctgttctttatagggggggaagatatggcacgaaaagcctattctgaagaagatagagtgcaagtgcggaatgccctgatgaccaccatgattcagtgtatcgcggatcggggattgattcacagcagtattgatgttctgtgcagaaaagtagggatctccaagaccttcttctacagttttttctcatccaaagaagaactggtgctctacgccctgcgataccaacagcccaagctgctggattatgccagatccctaatggaggaccccggactcagttggcgggcgggagtggaaacctttctgaaaaactgctgttatggagctaaaagcggagttgccgttttgtccattgaggaggagcagcaagtacgccactgcctttccgaggagaattttcaggcgttccggcgggatcagattattttttatgggaagctgctttccatctttagcctccctgtggacagtattgatccccggctgtttggcaatctggccctcagcatgatgatggtacacaaagccattccagacaccatgccatttctattcccagaggtggcggaggatatggtggacttccaggtcagggctctgatggacgagatggagcgggtaaaagagcatgtgcggtaggtgaaagcaaatggatagagatgagtacccatgtccaaacggacgggaaagacagcagaatatcgtcagacacagagccttgggatacaggtcttggttctgtgcggccttttcgcgccctgcgtcagcctgtccaagtggcagggtgtcgcagggcgtttttctatcatctgaaaggagtcgaaaaatatgagtctgaaatatacctgtcccggctgtgggacccctttgggctatgacggattgtgctggaaatgcaagtgtgagcaagagcgaaaaactgcattggcctggacgccggaacagattgctgcaaagcagaaaaacctgatccagaacatccatcggcttgctgatatggaggaccccgaatgcaccgacttctggcagctgctgggttaccgggacgccatcaccccggaaatccagcgggcggcgctggccgcaggggtgttctggccctgtgagatctattatcacgctcccgctgatgtgggggagggcctgatccacgcgctgctgtccacagaggattccagtgaagcgtccaacctgatgtgctgccttgctttccagggcgatggccgggcactggaaacgctgttggaactggagaatcatccccgctcctggcgcaagaagctctatgtagacccgtccatttacgcccagtgcggcggctggacctttaataaaaagggacaacggacccaactcaacttcgatacctgcttttccttcgtcaagggagcccccggtgaagtgtcccccgttcgcatcgggcgggcacgggaggacacctgtccccactgcggcgggcggatggcggacatgctggtgctggacggccgggacgagcggctgaagtttctggggctggacggcattctgaccgccacctgctgtcccaactgcgtgggctttctgaaaggccccgctttcaaccgctttactctggacggcggcgtagaggtctttccctcagagctctttgacggggcgggaaagatggactgctatgtccggccggaggactacaggtcccttaccgaaaatcccttcgtgctgggcggtgcgccagtgcccctgttctatggcgccgcctgtgacgatgtgaacaccgttggcggctttgccaactgggttcaggactgggaatacaccgcctgcccccactgcggaaagcccatgaaatatctggcccagatccagtgggatactttgatggacggcacagagggcacactctacatcgagttctgccctgactgccagatcgtatccatgcagcaccagcagacctgataggaggaaatcgctatgaatttgccaaagttcaacagtgcggacgggcgctgttactggatgaagcccgaggtacaggaagaactgcaaccgctctttgaccagtgtatccaggatgccattgacgggagaatcacgcggcttgatgattcccactggccgccggtagtggtcagcagtcaaggtgcaccctttgaggtgtggcaactgcttagggcatggaccgaaatacagcgggccgagaccctggatgcggaaaaggccatcgccttcagcgaaaacctgcgccgccagagccgctggggtgaaattgaccaccatctacttgatatgctgaaacgggagctacaagagaagtattttgttgcaacaggcgatgaagatgatcgcttctgggatcgggagtattccttgaaaccaggcatccgtgcagagcagatcccggagccgctgctgcgtttcgcctgctatgtggcggtgagctataaagtgtatggcttggactttcagtatctggacgccaattacctctttggattggtggagaaagtccgtcctgatatggtgaaaaagctccgggaacacgggaccggcaggctgccgctctctctgcaaaagaggaaaacagagcacttcaccgcatcggccaacgatgcctttgctgtgatccgtattactgccagggacaacacagaggaatgctgccacgaagtgctggactacctgtgtgagattctggagcaggaggactttccccgcagctatacggtggagttcaaagggccggaaaagagctatcttcccatcacaggactgcccaaaaagggagtaaaccagctctttgcctgtgccgtgcagtaccctggcctccaccccctgatggaacggtacgcccggcttgccatgcggcaatatgagcagtacaccaatctcagcgatgagcagtgcgcgctccccggaagttttgccgtgttcgccctgggaatgctggggcaagaatggtggcaactggtatgggattatctcgatctctgcgatgatgagcactcccacttacaggaaaaattcctccgggagtatgtgaaacagttcggatttaccgctgataccgtccctgtatttgtccgtggggtgctgtccatgcagaacatgaagtattccaaggactatgccgcgtggatggcaaacgcagaaagcctggacgctctgctggaggcaaaaatccacctgtccgagatcgttccaagcggtttttcctctgacgaggatgacgatgatgacgagggcgaggaacccgccgaagaaacagaagccagcccggaggaagtgctgcaatacgcatgggaaacggtctgctatgtgatctggggcaaagccagcgccaagggtggtcagaaagtggtggaagcagctccggaggaactgagagaaaggtatcaggaaatttttcaatagactataaggaggactcggatgagtgaagtaagctattcaaatgtacctcccatgatggctgccatcaaaagtggtgacatagaggcgattcgttccctgcttcacgcagggcattctcccaatgagccacaatgctatcaggtaatgattggagattggccgcgggatgacgaagcctttccgctggaattggctgtactggaaaatcggatggacatggtacagctcctgatcgaatgcggagcagatttgacccataacccggaagaattgctttgtggttccctgcgcagtcaagacctaaccctgttttcctttttggtagatgtgggagtcagaatccccgcaacgcaaagggatatatgcaggctgtttctccacttggtggatcgggatgagcctaatgtactccccattttgaaaaggatgggcatggatttgaaacaatacggcggtgaagccctgcgcagtatggcgagccatggaaatcagctgctggtggagtatctgattcaaaacggggcggacatcaactatcacaagccagatatggtgtttccctacgcttcgactcctgtcactgaagcggcacggcacaacgatttttctatggtgcgctggctggtggagcagggggccgacatcaccatcccggataaatacggcgaccggccctacaccgtggcggtgcagaacaaaaatcaggaaatggccgcctacttaaaagccctggagccggagggctggcataacgaacaggaaaaggtgcgtcagctcatgccttacaagctgcctgccaagctggtggaatatttgaaaaccggccccctgcgcctggaatttccggagcgggagctggtgaaatgggcggagctttacccctacatggatgtgcaggagatgacctggaaacgaaaaaagctgctctcccttatggcgaaaatggacaattacagcgactatttgctgctgtggagtcccagagataagaaactctggtatctggacatcgagcatgaggagtttcatccgttagccagatgggaggaatttatcgctgaccccggaaaatatctcaatggaatgatcgagggcgagtttgaggaataaggggagaacgcaatatgactatggaacaactgccccccaagggggtcaagcgagaacaggccattttggagttgggcaaggctgaagccaacggcgaactgcttctccagcttgtgaatatggaaaagggcaagtgcaagacggctgctcagaaggctctggcgcagctggagtatgcccccgccgccccactgtgggccaagctggtcaagggtaaatggatgggcagccatatcatggcggacgcctgttccgactgcgtgtcggagcagatcgccccggccatcttaaagaccctctcccggctgctggacgagggggacacaaagcccctggaaatcgaacagttgaacttctgtctccatctgatgatggggaaagcctcgctcaaaatgctggaggtctaccgcttcctggcagaaaacgcccagcggctcgcccggcttaaacgcgcgcctgtttatccggatgacgactgcacctcttggtggattacggacggacttcgcatttgggatgccacacccagggaaaaagagaaaattcccgctgtggtgctgaccgcctccctgatccgcaacccggatgagcggctgcaggcattggcggatgagctgaacgaacgctgcggcggcagctggctgatcccggtctttatgaaggcgattctcacccagcccaaggagcaggtgtatgagacctattcgccccttttggggactccaaaggcgagctatctgttgaacgccctggggctgctggattaccgcagctatccggaggactgggcctttgaacgctcgggtcccgacgggctgcgcgccctgattttctggggtgattacagctatgggacctatgacacaaggtttacgattgaacgctatgtggagctggatgagcggtggctctttgctctggcaaaagacccggagggcaaaaagcccgcggtgacatggcagacctataaccggggcggtgtgctatacgggagctacgacgaaatgctcatcagcctgctgccccgcaaagtggagaacccagaactcaggcgcgccctgcgggactacttccgtattcgcagcgaaaaagtgagcgtggaagaaagtattactgtttacaaagacgctgctgagcggtttggcggtgagtgagaaaaaaatatcaagaaggcaagtgcctgaactgtgaactacgaagaaaggaagacacaaaatgaaaacctttgatcccgattacaaactgctggacgagatgtatcaggatgattactatccagtttttctggtagacaaggtaaaggacgaactccagaaggtcatcgacctgctggagagcggcgaaaccgacaccgaagtggtgcaggaaaagctggacgaagcagtttgcggcatcaatgacctccaggacgaattttacgagaacaacagtgagattgaaacggtagcccgggactgcatcggcgtcactgtagactacattttgaagtggtttggcattccgattgacatggaggaggctatccgggaacgggactggtgacttttatgaaaatggagccctctttttgcacggcggtcttttggcgtggcggagaaaagattgatctaaatggacaaaaaccagatgcggtacggtgtctgtctgtgacgggagagcggaaggtgaatctgtccttcctgcgagattatcccaatctggaggaactgaccctgatggaaaagtgtgagggtgtagaagttctctccgagctaaagcagcttcatacactgtccctatggctgtcggcccctgtttcctgggacaatgtttctctccccggcctgcgtgttctccacctgcgtggagaaaagaatggcgacatcaccccacttctcaccagcattacctatctccatttggaggaaatgcggaaaacggaagatcttgcccctttcctgactccggcgacccggcttcagaaactctatctccagtcactcccagctgtgcaggaactaccggctctggatgggcttccttccctttatgccctgaaactctatgaactgcataaactaaacgatttgtccgccctctcccacagccatttgcgctgctttgccgcctctctgatcggggataaactctccgcccaggcgctggcagatgctgtgatggcgattcccaatctggaggcagccgcgctccagctggcggatcgctccgagcggcgctatggcggcatccaaaaagcctttgccgccgctgggaaatcctcattgctgcgggaggaaatcagtgctttgaccacatggctgtcgctatgatgtaggaaatgggaaaaggagaaactacctatggcagagttcaaacaaatcatagatgatgcgctggacattctgaaatttgacggagccgtacaggacactctggcggaactgcgagaaaaatggggcgcgcaggtcccggcgctgctggatgaacgctttgatgccgttggcgttcagtatatgaagctatcccatgaaaaaggggcggcggcattggggcaggagctgtctgccttcggctgggcgctgtataacctggatgatgaggacgagtatctgtttgccttgatcccagaggaagaacgcagcgaatgggaacgctactgcaaaaagcaggggcaatattgccacctgatgaaacagcaagggcgaaaatggggcgaccatgccaaggagcaggaccctggaaagctaatgccctgcgaggaatacatacttcaggatgagtacgattatttcttcaattccgtagcgggtgattttgcggcgggcgaatggaaaaaccaggatgcagaagaatggaaaaacggctgtgtggccgatctgcgccagcgtccgccccaggtgacccgcgcccacagcttgccgcaccttgggtgcctcacttattccgcagaaaatggactctatgccacgtccagggccgctggcagcgggactattggccgagcattattgagcaagaatccagccacgcttaactgggccgaaccgtcccccattggatatgacggtccaccccagaccctgtgctgggctgaccattccctctgggtgggtgatcccaccaacgctacacggattgaactgacagaccggggcgcctgcaaggatgtgaaaaactggactctgccggaagatggatggagcaccaaataccattgcggcattacgacagacggtctgggccgggtctacttttccaacgagtggtacaaggggcagatttaccgctgggaaaacggcaaggtaacaaaacacaccttctctctggatggatacgaccatctctccgaggccgttcccgttcccggcacaggccgcattaccatgatccacgccgtcagcggcaaggggcggatggaagaatgcctgctggaactggacatggacaccgggcggtgccgcatcgcccccctgcccggaatgggcgaggggctgaaactgcgctggtttaccggggactggctgctggtgcagggaaacggcgcaatcctctccgatgactttgctcagctcatcaataggaacacccgtgaggtgctgcgtatccgtccgggaatgttcggcggggagaaaatgcagcacattggaatactcaccgatggcacggtggtcatcgtcacccggcgggatagggttgggccggtgtttcgttatcccatcgacttctgggacttcctgcggacggcaaacaagcccaaaaagctggaatggcgggagtacaaagaagtgtacccgaatctgcccatctttctaccgcccaagaccacggagcgaaaaattgttcttaagaaagacagcctgaccattctgggggcggtatttacaccgccgtttaccctgtcgcggctggcggaaaagctagggcctgcccgcattgtcttacaaaatggaacacggaaaagccccatgactggccaggagagcccttatacccaggcacttgctttgtgggacgagcttggactacagggctggttggacgaagatgagcagaccatcaaaaccattggtgtccgggtagcggcacagggagagtatgcggtccggcagacatttgacggagcggtttggatcgggtccaaggactaccgagaggccagctggaaggatttcgccggatttgcccataccctcaaattaggcggctttaccgtctatacccgcttgccgggtcctgttccagaggagcaatcagcgcagaaagcaaagctggaggccctctccgccatggtacagatcagctggaaagagccagagaataaggcggcgaaagcgcagaaatacgagttatccaagccgactgaaccagtgctcacctttaccagcttcaacttcaagctggcggttatggaagtcctgatgtacgagaaaggcttactggctcctaaactggatgcccatgagttttccagagagtatagccgacgcaagatcgacattgacgcggaagggtatgaacctattccggagattcggaagtggctggagaaataccctgtcccggcgcggctggctccagagattacagagatcgagatggatggcggcagcgagatttatacccaactctgtccgttctgggatggcgaggatggagcctttgatcttaataccattacggaggcggaactgcgccagttccccaatctcaaacatattaccctcatgtcctccaagccggaacaggtgctgcccgttctggaacggtgcggtatcaaggtagacttgctgtgaggtgcgctgctatgaacgaaaaactatttcgcccacaatttgataccttgaaactggccgataagctctggcttatgcagacgctggcgactcgttatcatttgacattcaaggaactatacgccttttcccgctggggacaaagctgcaccaccggcctatttgaaaaaggtggccgggagtttgtctttgtcccgggcgataccgtgattcttggctgggagagttttgtccaaggaatggacaaggccaaccaagaggaactggcggatatttttgcggaaatcgaatatgagggctctgcggaggaatttctcaggcagggcatgaccccagtacgccaggtgaccatcgcccccatgttcgtgggcagaaaactggaggaaattggctgggaaagcgtacccatgaacgatccacgcatcaccgcccaccccgactggctggagaacttgcagaagtgggcgggccagaacagccagagctttgaaatacacgaaactgtccgctttgaacgcaatggtgatagctggcgagcgtggctgtgccatccaatgacctacccggaatttcagcggtccctgttgtgggagctggcagccagccttcccacgccggatgagtgggcctatctgtgcgggggcggatgccgcaccctgtttccctggggggatggactggaccacaagatgaaactgcaccactttgaaaacggggaagatcagggtaagccatacgacatggagcagcccaacttctttggcctgtctatcgcctacgacccctataagcgggagttggtagacgggaaaacattgaccacctgcggcggcgacggcggctgcaatgtctgcggtggcatgggtcctttgcttggatatttaccctgttcccctcactgtaaaccggaggttcgggaggataatgagattcacaatgactatgactttttccgtcctgttatccgggtgcagacatccgggtggagaatagtatcacccgaaaatgagaggtgatattgatgaaaagccgattggagcaattattggacgagctattaagacaaattgatatacctgcgatggagcaagccatgtccaagcagtataagagccagatccgcagacgctgggaacttccggcagactattggatgctgttggagcgctgctgtggactgcgaaccgtgtggagcaatgatacctatgaggccctggaactgtggggactggatacccttgtgaagggccaggagggatacgcctataatcctgtggaacaaaaggtaattaaaaattgggacgagcatcttgtggtgattgcgtctgatgctggtgatccatactgcctggacctgcgacggaacgatacagccgtgttctgggcagaacatggcgccggaacttgggactttcagcctgcctttgattgtttggaagattttctcgaaagcgttttggatgtacccaaaacgcaggaatatgaaacagcatatccctatcactacatccgcctgattgtaaccgggatttccgacaccaaaaaggctctggtgtttctaaaacagcattttggcgacagcagctttcagcagacaaaagacaggctgaaagaactgccgctcttgatctattccggtcttgataccggaaccgccccgctggaaaactctcttgaccgctggggattgatgtacgaaaagcagcagatttcgttggaaaagtttctggaaaatcaagcatatatccgcaatctgtaaggtcgaagctgcgttgtgcaggtgcgattcatcggcattggagcccgctaaagacaatccaaatgagcaaagtacacaatgatgtgatttttggaggaagtcatgatcaaagcaattatgaaaatccataccacttcttcggttacatttgtatgtggcgatgttgctattattggaaacggtgagtttcgggcttcatcaggaaaagtggatggctttatcctgtatgccgacactttacagtatgaaaacggggcgaagctctcacgggatgaacaggaaaatttgaagtgcctgtatcagcactttgtattgaaccgtgaagatttcatagactgggatatttgaaaagagatttccccatgaaatgttagcagattgagcacaggagtaaggaggaaagctatggaatggccaaaacgggcgcggacagcggattgggaaaatggtgtcctggccttagatagagagaaacaatttgaagtcccgaagctgaccgcagagatcatggagcggttggccggttacaccctggtgggcttccatgtgaaagggtatccggtgacggatgaactgcttgccccctttgccgggcataaaagtatggtcaacttcggcgtggagaacggcgccctcaccgacgcctgtttcccctttttttccgccatgcccaagctgcgctatctgctgctgaccgggaatgccgggatcgacggaagcggcttgtccgccctgcaaagctgtaagctggatctactggcccttgaccacaccaagctggaggatgccggtctgcttcgagcagcctccatccccaaactctcccacatctggatcgaccacactgctgttacttatgatggactactggctgtcgccggcaacaactacatccatccggtggcccatgtgcaatttaccaaggagcagatggaacacttctcccagctccagcgggaaaaggccaaaaagcccgtccagctggatgagcaggcagcgtcggaatgccgcaatgtgttgtccgctttctttgccgaaatgacagaatgggagcagtacatggatcaggttgggtttgaagatgccgaggctgtgccccgcctgctggcgatctgggagaagtatgtgagcgaaaagccccgtccgggctatctgcctctggccctctcatacagcgcccagggcacctacaacggggaagaattccttgacgcggagcagatcactaaaaacaagctctacatctacaccagagagaaaaataccggctttgaccgccgctttctcatgaagcgcgtgggcgagggttggatgattgacgcagtgcaggagcggctgaacggctggcagcgcgtgggattgtaagggaggcataatggatgatatataggtttacggaagtattaaacgatcttgttaattattttctccttggtgacattttgttgctggaggactggaagcaggcaaatcatctttcagatgatttagcgatggagtttaccacaaacgaaagcggcgacaggatatttgccgaaggaattgtaatcccaatgaccggtattgaaaactatccctataccatattgttcaatctctctggtgatagaccggagctgtgcaaagaaagaaaccgattgcagcttagaaaaagtggctattccctcaaagtagatcataatatgctgatgctttttacatggccaatattggaacagtttacgcctgaaaaggtgaaagatctgatttcttactatagagtgcataagaagccgatgattgagcttgcaaatggctggtatcatatcgagattttgggtggagaaaccttgcaggacggggactatgaacctacatttgagtttgtgatacaaccagccacaaatgaagaagccaccataaatgcagatatgaattttagctttgaaattacaagctctgcttattagtgaaacctatccctaccgaagatggaaaaggagatcatgatatggatttattgaaacaatgccagcaatggtttgaacaggatgaagcgcagaaggtaatcgacaccctggaagcgattcctgccgaggagcgcaccccggaactggacagcgaattggccaaggcatatattgccgttgcacatataggagaacgggagccctttgaaaaggcgctggaacttctggctccccatgaggagtattttgccgaagatcactgctggaattatcgaatcgctttggcctattactgtctggatgaggaaggccccgccctgcgttactttgaaaaggccctgaaagcccgccccggagacaaagatactcaggagtacataaacgattgccgccgtcgtttgtccctgccccgctttgaaaagaacttccgtgaaaggacgcaggaagcatgggcagccttttctcagattgaggcagaactgcgtcaaatcatagatacggacgaaacacaccagcgcggcgaagaactggttgaaaaatgcgggaatgcactcaagacggccctgcgtgatacttccttcgagctgggcttcaatggcgaaaagcatgaattgatcctcagtccagagaggcttcgctcccgcctgttcccgttggtgtacttccagaagcaggccccagaatcggtgcttgagcattggaatatctgggtaggccgccagccctgtgaggggttcgagctgcgagctggagagattgaagttcgggctgaggatgtgcagatgtgggcagaggaaacagaggatcatcaggtaagtctggtcctttactgtgaaaagctgaccccgatcttgaaagaggacacagacaaggtctggtgggcactctctatgctggtggatcaaaccatcggagaagtttccgctatcgcctttgttgctgggtttgatgtttatgctcaaccgaaagacgaaccggccaagctgctttccgaactgccggagttgctgcaaagcatggggctttctctctggcgggatggcagcgactacctggaaaacagttatcttgcctatgaactggaaccggtggaggacccggaggctgactggcggctggatgtttatactggaagctgccgcctgccggtgctcatcaacgactacctgactgcccgcagtgatatggtggatgagtaccacaaggatggcattgccgctggattcctcctgtacccgctgtccggttttaccggtgaggaacgagtgaaagctattctggatttccgggataacctgcgggatgccatcctacgggatgcaggagaggaagccgtgaccttcctgggtggggccactggtctgtattgtgggtatctggattttatcgcctgggatctgcccgctgtactaacagcggcacaggcattctttgagggaagcgacctgccctatgctcacttccacgcatttcggcgggatgtgggcggtgtgccgctactggacgagaaagaaccggagcctgatatttatgaggaaactggctccctgctctcggcagaggatattgaaacactggaatcctttgatgaaggaaccaccggttactttgagaaaatgctcggctggctggaggattttatcaaaagcggcgtagaagaaggacgattcagcgaaaaacaggctcatcaggatttgcagattgccctctggtatgcctttgcctgccttaacctggacgattacatccactactaccgcgctgcggaatggatgaaggattcggagaaaaacgccacgggctgcgctacctggtactaccggtattctgtggcgttgatgtattgcggcaggctggaagaagcactggaatatgcggagcggggcgctcaggaggagccggactacccctggatctggctccatctgggcaagctgcgggcgcattttggcgataaatccggtgcgctggatgccgtcaagcaaggattaaaactggaaccgggagattatgagttcctgaccttaaaaaaagagatcaaagccggagccaccctggagcagatggaatatcattggatcaatcccgatgctgatcaaacgctccagcggggactggacgaagatgcggatgataaacaatgcgccatagcctgcattcgggtggacgaagcaggacttgccgaattttacgagttgttctgcccagaacggtatggctatcagaaaaattccccctgctgtgaattccaatacccggtgaaggaacatcttgtggagctttccttccgtatgaacgaagctggactctccaagatgggaaccgactggctgcggcagctaaaggaacggctggacagcggcgaatggctgacccacacccctgaagaagaaccagagggcattctaacaggtgtgtttgtggatcagctgcgccgcattggtcttgtctatcaacagcctggagaggatcaatattttcagattttcctgaacccggacggtacgaaggcggatgccttctggtcctcaagaaaaaacagtgagccggaggtttattcggaagatgagatgtctgcgatagagcagcacatcaaaaacacctttggtgagtttgggaatgtgttccatgaactggtttccactgacatccatgtggacatctgcgttgttcctccctctgaggagcgggactattacacactggtgacgatgggtatgggtgctcaccggatgaatgtgccggaggaactggcggaatacaagctggagcgagcagagctggccatcgctctgccgtcggattggaaactggatgaggaatccctgaaggatgagcggtggtactggcctattggtctcttgaaagtgttggcccgcctgcccatttctaacgatacctggctgggctttggccacacaatggacaagcagtcgccgtttgcagaggacacgaagctcaaagccgctattctgaccggtccccagggcgtggaggaaggcggcgaagtctgcactttgccgagcggcgaggaggtcaacttctatcaggtgatcccgctctatcataatgagatggagtataagatggagcacgacgcagacgctctgctcgaaaagatggcaggcatcagttttgtggtcaatcccacccgccagaatgccatcaccagaggaacgcttgcagaggaggagttcaccggcgatatggacgatgctgcctggcacctggaatccattcaggaaaagggcctgccggtggacgagatcaatgcctacaaccacatggcaatctatctgcgctggtgcatggagcatgatctgatgagcgcagaattcatggagcggtactgggagcaggtgcagccgtttatggcagatctgagccgcgccgatctgcgtggttttatccgggaccagctgaaaggacagctctttggggcgctgttcaacaaggagggcgcagcctttgctggatattactatggcgaggcggacagcccgtacttccccagcgacattgataactatgctttggaatatttcggttcagagcaatattattccgataagttccaggatgaagcctatctgttcatcccatttgatgaaaactattatcaggctatggcaaaagtcatggaaaagcggttcgccaactggcagggacagagtttcgatgaggccagtctggagccttcagaccttgcggaagccatgatggaatatctggactgtgaatgtacctatttcccctcaatgacggatgatgaccccatcatgtcggcatataactatgccaaacgggaaagtgtcaaagagggctttgtgccggttctgattaaggcggatgacgaaatcctgtgggaatgcctgattatgaattctgacccggacagcgatggcgaggacgactttgctttcgacccggacaaagtcgccgaataccggaagaaaatgctctccgcccctgtcgagaacagtaaggcagtcctggaggaaatgattgggcagcgcaaggaagaagccgaggatgacgatatggactgggatgaggaaatcctgggcgagatggagggcggatatgataaccgtcgtttttcaagctactggaactccgataataatatgacctatcctctcattctggctaaaatccccgtgaagaatccttgggagatttttgcctatctgccctttggtggctggaatgaatgtcctaacacgccagagttaatggcagttgcgaaatactggtttgaacagcatggggcggtgcccgctgccatgagccacgacgagttggagttcctgctcccggctcccgtttccgaggagaaggctatggatgcagcagtggaactgtatggcttctgtcccgatgtgattgaccaggggccggaggacgccaccgtgggcgctctggccgatgtgctgcggcagtccactgtttggtacttctggtgggattgacgggaggctactcaaatgacaacacagttgtatcttcaaaaagcagaaatgcagttatcaagaggacttgaggaaaaagccctggaaagtttgttgtcggcgcttgcctgtcaaaacagagataccgtcagcgaaactcaaacgcgctgccttttgggtgaatatcagttcgtccatcagcagtatgttcaggcgcaggagcagtttagctggatttctgaccgggctgagcagctggaacatgactatgatgacctactcaatgaggagattcgtgaagctgaggtgctgttagggatcatgcagagatttggattatgttctgagcgatgaagaaggaggtattgtcccaaaagtgttgcgtgatggacttgtgttcaaagatgaggatggtcaggtcatattcaaccagtacagcttctgcgaactggtgaagcacctgctggtggagctggtggggatctcttatgaggaagcctcccagatagtggaacgctcaccgttggcagcgccagtggacaatgccatggatgtggcgatattcagccatgacctgccttattactgggctatgttttcctactatgggaacggttattggtggggggacaagggtattccagcgcagccagaggatatggatgcctatttcgctttagaaaagcaaatcatggaaaaacaccacttaaaagagccttttgagtgggagtgaaaggacggattcagtgggatacgatgtgagttttcacccgatttcaccagaggaaatgcgggaatggtattttactcccttaacctggatacagcagggacaggaggaaaaagtgctggcccttgccgcgcagtatgggatggaggatttctatgccgaaaaatatctgaataccttgcgggttggggctgaaacggaagctgacgagctgtttgacaaaagccacggcttctatattgcagtaatccaaggttttttccgagattattattacaccagaggtagtgccttttcgttcctggtggaacaaaagccagaatatgcgcggtacttcacctcatgggaacaaatcactcctgtttcctttccaaaccccatgcagaaccgaatcatcgaaaactattgctccggtgtatatctgtctccagatcaagttatacaacttctcaaagacatggagcaggacccaaaagtccttgacgatctggaggggctttggagcaatggacagattgctgtgctgaaaaaagcactttctgctgctgcaaagtcaggagtcggtctgttggaggccactgaagtggtagagcccaaccccatcagcccgaatgagagcacaagctactctaacctgtaccactgtgatcgggacggggtatatctctacatagatgccgtcagtggtcaattagcggatgcgattgggaaaaacgaaggatagattctctctatgaaaatgtgtgggcatctgtgggaagaaccaaaataggcagctacccacaatattgattatcgcagaaaagctcaccgtttcggtgagcttttctgcaatatttcataatttttttattgctaccactggttgccgaattgacataggtggggtggtagagtggctaccacagaaaaaatagaatgaaagtgaggaggttcactatgaagttacccgaaaagattcaaagggaacgaaaaaagatgggactgtcccaggagaaactcgcagaaaaaataggagtatcaaggcaggccatcacaaaatgggagaacggcttggcatcccctgaactggaaaaaatcgtctcattaagtgaatgttttaaggtatctactgactatttgttaaaggacaatattaccgagccgaccccaccacaagaatctgcattgaaaggaaacaagcgaatgtcatggagaacgtggcttggaggaagtttgtttggaatatcggcgctgattatatttgtattatggcgactttctgttcgttttcctatttcgggaatgaccggaaacggtgtccatttaaccggatttagtggctttcttggctttcatggaattttacatgaaagctatgtaatagttgcgattggaataatcggtttgatacttgtgattactgactttatccgcataaaaaagaataatcgctgatgaccggacaatgcagagttgatcttaaactgaataggtttatttcggctcggcagcattgacctgtcggtagaaatacatatatttgaattaagaaagggagtgatgctgccggtgtgccgtccgtttgtatggacaggagtctgatgcactatgcaatacctcaagaagcgcattatgctgttccgctgtctttacgcaccacgacacacggcttacaagacaaagaaaatcatctttatatggaagtatggtggccgggagtattgttctaaaagcgaaaagcctccacctgccaaaagatgctttttctgcggactttttaataaacgacttggagcggtcgaatttgtactgagttacagattcggccgctttttgatttgttctcgactacttggtcactggtgtcgagcaccaccacttccgatttgttttccacaaaaaacaaatcggaggtaacagaggtgcaaaattatcgcaaaagcgactatgcgataaacaaaaacagcccaaatatcgtttatcgctttcataacgaaatcatagaaatcacactggaggattatctgaaggagaaccctgacaaaacggaacatgactttgcagagctgaaagccctgtccgatcaaatttactatgagcaggatcgggcagagagcgcccagacccgcaaggatgtttcgatccacggtttggaggaaacggagcattgtgccactcgcgctctggatgaagaatgggaagaacgagttgttgacatacagaaccgcaagtatgcctggaaagccctggagcagctttttacagtgggcgctttgaccgaggttcagaaacggcgattccggcttcatgtttttcagggactctctacccggcagatcggtcgcatggaagggacaagccatcaagccgttgccaagtccataaacctggcgattgccaaacttaaaaaatattttgcggcacagggttgacacccctgcggtttcaggacgataggtgaaaggcattctttcgagtgttcttctttcacctgtaccttgacaaccgcatactcattcatcagtaacatcccccctttccagctcgaagagctaaagccgattcaggggccgcgccatgatatacggacatgatgagcagatcccacctgattatcataattggtcttgcatacaatcctgtcctgtatgagcgagtaacggcagcctgtaaaaaccgggcagcacccggcgcggccatgaccggaaaggggcataatggtactcctgtccagccacagccctgcttaagatcagagtagtccataacatttggaaaccatctggttgcaggatcacgcaatgggggcagctcggagagatcctcggaggggtgagattcccgtgggccggttcgctgccggtcactgatgacttcccaatatgtgcggggtgtcaaggacaaatggcacataacaagaaaacaaatcggattttgtatttcgccggaaatggggcaggtcttatggcctgccccgttttccggcttacttaatattcaggaggtcagtttatgcgaaaggctatccggcgtggcgatctgttctatgcagacctgaacccggtggtcggctccgagcaaggcggcatccgccctgtccttgttatccaaaatgatgtggggaatcactttagtcctaccgttgttgcagcagccatcaccagcagaaaagcgaagaacagtctgcctacccatatcctacttgagaatgtgccggggcttgcgcctacctctctgcttctgttggaacaactgcggacaatagaccggaagcggctccgtggttacattgggcgtatcagtaaagaaaaaatgctggaggtagatgcagccctggcaatcagcatcggcataggataccccaacgaaaggaggactcacaatgtatgaaaatgacggcggcctactctctcccagagatgcctaccgattgatgttaaaagactacccggatgtgatggacattggtcaaatgtgtgaggcgcttggcgtcagtacaaaaaccgggtacaagttacttaaagatgggaaaattgagtaccttaaaattggacgggcttaccgcatccccaaagcccacattcttcgttatttgaaaatcacctgctccacttttgcggagtagcaggctatggtgtcgatcttcaccggatagacgcagaaagttaacaattctgacgcggatttacctggagttttgttctgtccgatgatacaataaaggtgtcattggtaggtgaactcaataccgcaaaaggaggaacagatcagtatgccagcggtacacctgcaagaaaacagcaaactaatctccggccatgtggccgagaaaaaagggtatctctattgggttctaaaccttaccgatgaaaacggtaagagaaagcccaaatggattcccacccataagaaagtcaagggcaataagacctgggcaaacaatatgcttcccaccatccgaaaagaatggacggaaaagctgcttcaggaggctacggcctcacagcagtcggcttctccgtctggcccgtcatccgcagcgatttcctttgtggatttcctgtaccagtggcttgagtacaagtacaagtctgctaccggacgggtgatggacagcaagcccattgaactctcgacctattcgggatacgaacaacagcttaacaaccccatcgccccgtatttccgagagcatcctgtcgccctttgtgaccttaccaaacaagatattctcgctttttatgagaaagaattggaacgggtcaagccgaccaccgttaaacattaccacgctctgattcatggggcgttgaattatgcggttgacaaaaatctgattccaagcaatccggctgaccggattatcatttccaagcctgaacccttcaagggtgactactacctggattcggaagtcctgaatctgtttgaagttatcaaggggcataagatcgagctggtagttctactgactgctttttacggcctgcgccgcagtgaggttatcggtttgaaatggagtgcctttgacttcaaccataactgcttctccattcggcatacggtaacaacctgcaatgtaaagggagagcgggtcacgattaagaaggacaaggcaaagaacaaatccagtctgcggacttatccattgattccttttttgaaagaacggttgctggaggccaagaaacagcaggaagaaaatcgcaagctgtgcgggcgcgcctacaacaaagaatatctgggatatgtctgtgtcgatgtgattggcaatctcattaaacccaactatgtgtcctcgacctttgggaagttgcttgccaagaacaatttacggcacattcgtttccacgatcttcgccatacctgtgcctcgcttttgctggccaacggtgttccgatggaacaggtaaaagaatggctgggacacagtgagatttcaacaacggtggatatttacgggcatctgcaatatgccacgaaaaaacaatccgccgcagccattgagcaggacattgtggcgcccatgctgcaaaacctatcggcggtttctccataaaaaggaaagaggtctaccagcttttcgctggcagacctcatggcggagatggagagattcgaactctcgcgccggttttgagccgacctaccgcatttcgagtgcggacccttcaaccgcttgggtacatctccaaatttatgttatatccctggtcccgacccgccgaccaattcagccggtggaaatcgggaagaacaacaggatagaacaagcaacattattcaatttgaactcggctggaacccgcatggttccaagggtttcagccgtttggcactccgcataggaaacctgatttcgaatcattacaccaacttggatgatgacggtaaatcagggacgatagcggtaactacggaaccccaaaacacacctctcaaagtggccgtcagatggctgctctcattatagccattttcccgcaaaattcaagccgtggaaattgggaagaacaacaggatagaacagaccccaattcacgatttgaacttgcccgcaaatccgcatggttactggcttttcggcagtttggacttccaaagtggaaacatgatttcgagtcgttctcgttacgaccgcttcgatacatctccatgataaactttatatagtatagcaaaaaagcctgttggcgtcaacactttttcgcattccaaaccccggggctgcggtgcagcagtcccggggttttcagctttttgcgcagcacggaaaattttgcaaaaagggactggtatttttgcgggttttgagtataatagagaagagatagttcaaatttgaagtatagcagtttgcgtttttaatgccttggcaacatccgcaaactgcatatcgcaaatatgccgttttgataggcgctattcttgaaaattgcgataaaaaaggagaatcacatccatggcacaggcaaaacaggatatgggctctggcaacgtaaaaaagctgatgctgcagctcatgatcccggcggtcgttgcacaggtggtcaacctgctgtataacatcgtggaccgcatttacatcggacatatcgccggcatcggcgcggcagcgctgaccggcgtgggactgttcacccccatccttatgctgctgaacgcattcgccatgctggtgggcgcgggcggcgcaccccgcaccgccattgcgctgggacagggcgacaaggagcaggcggaaaagatcatctccaacagctttaccatgctgctgctcttttcggtggtgctgaccgtggtgttctacgccggagcacccaccctgctgcggctctttggtgccagtgacgccaccctgccctatgcgctggcgtacagccgcatctacattctgggctcggtgttcgtgctgctggtgctgggcatgaaccccttcatcaccacgcagggctttgccaagaccagtatgcttaccaccgtcatcggtgcggtcatcaacattattctcgaccccatcctgatctttggtctgggtctgggcgtgcggggcgctgccattgccaccgtgctcagtcaggcggtgggcgcggtgtggatcctgcgcttccttaccggccaaaagaccatcctgcgcctgcgcaaggactatatgcgcccggaaaagaaggtcatcctgccggtgatggcgctgggcatctccacctttgtgatgatgtccactgagagcctgctgtccatcagcttcagctccagtctggcgcggtacggcggcgacgtggctgtgggtgccatgaccgtcatcaccagcgcttcccagctgtgcaccctgcccattcagggcatctgtcagggcggtcagccggtgatgagcttcaatttcggcgcgggcaaaaagtcccgcgtcaaggaggcgttccgcttccagctgaccctgtgcggctgctacacctgcctgttctggctgcttatgatgctggtgccgggggctgtggcaggcatcttcacctcggataccgcccttatttcctacaccacatggtccatgcgcatctacatggcgggcatctttgccatgggcttccagatcgcctgtcagcagagctttatggcgctgggtcaggccaaggtcagcctgctgctggcctgtctgcgcaagatcattttgctgattccgctcatcttcatcctgccgcacctgctgccgaacccggtgttcggcgtctttctggcagagccggtcagcgatattctggccgccaccattaccaccatcaccttcttctcccgcttcaacggtattctggagcgtggcgctgcaaaggtataacgcatacgattggaatgcgctccgctgtgctctgcgcatcatcagcggaaaaactatttttaatagaacaatgccggagcgtctgcggacgctccggcattgtattttcacgggttgggttgggaacgaactccctcagtcatcgctgcgcgatgccagctccctcggggagggagcctctggcgcgcccggaagctttgcgctttagcgccggaaagtttaccgtaatgccaaaggccccatctcagagggggctgtcgagcgaatgcgagactgggggagtttactttgcgcgcagcgcctgagggggtgttagacggtctccggctcacccagagccagcaccttcgtcagttcggcctgcaccttcgcgttggtggcatcggtgacggccagcacatcggaatagaacttttccatctcgtcacgggtggagaaggtggccacatacatctggttgcccatggcaccggacagtgcctcggggatgcggtccaccatgcgcatgttgtcctgatacttctgcatcagctgctcgtggctgtaaacgaagctcttgccgtcccggcggccggcaaaggcgcagtagtagtgctcacccaccggcatatcggtgccgccgaaggcgatcatgtccgcccagatcttgtacacgttggtggaacgggcaaagtcgatcatgtccggggtaaagccgccgcagggacgcatattgacttccagcgccacgatctggccttttttgcccatgctggcctgatcctcggtcatgcggaagaactcgaagtggacaaagcggctcttcaccccaaagctcttgacggcggcacggcctgcggcgcgggtatcctccggcagatccttgatgatgtagtagatggagttgtcatcgttgttcacgatgtccatgatggacaccgggctcacgttgcctgcctcaaagatggggttgccatgggcgtcgatgatggcatcgtagctgttcacctcggcgcggacgaactcctccatgatgtaggccacatccgggtgctccttctccttgtaggccagaaatttttccagctccttgtcgctggaaaggcggtgcgtatccgaagcacccacgccgttgtccggcttgaccaccaccgggtagcctacctgtgccacaaaggccttgcagcctgcaaggtcatccaccatgtggtagcgggcggtggcgatcccggccttctgatagtactccttcatcttgctcttgtacttgatgcggggcatatcagaggtctggaagccgctggtgatgtggaaatcggtgcgcagggcggcatcccgctccagccagtattcattgttggactccagccagtcgatgcggccatacttgaaggtgaaaaaggccacggcacggtacacctcgtcgtagttttccagactgttcaccttgtagtattcgttcaggcttgccttcagctcgggcttcagttcctcgtagggctggtcgccgatgcccagcacgttcaggccgttgttcttcagctcccggcagaactgccagtagttcgtggggaaattgggggagataaaaataaagttctgcatagtatttgttgattcctctttccgttacctctatgattgcaatgcccctgcggggcgggacagactttaatattgggaaacaacggcgcgtccatggacgcgccgttgtttcgttttcacgggatgggtcactgctggcccagaacgtagggcatatagtacgccacctgcttataccaccagttccagtcgtggttgacatcgtgaccccacaggtccacccagatggggatatgctttgcctcaaagatgcgcttgagcagccatgtggtgtccggctgttcccagtcgccctgaccgcagcagatgacagctttctggctgcggaacagctgcatataggggtgatcctccgggaagttcttcatgtagtccacgggggagttcatgtacaccagctcgtccatatagtcgccaaagccgtagtgagcagtgtagatgccgctgagcgccagacagccgcagaagatatccgggcggcgcagatacaggtttaccgcgtgggtagcgcccagactgcacccgaaggcgatgatgccgggcaggtcgctccagccgttgcgctgctgcgccagatgctgaagcatcggggcggcctcgcgggtgatgtagtgcagccactgctcatagcggcggatacgccagtaggggttgccctgtgcgtccgaccatgtttcctgatccatggtgtcgatggaaagcaccatgatctgcccggactcgatccacggggcaagggtgtcggtcatgtggaagttttcaaaatcgaaaaaacggccgtcctgacagggaatatacagcattgggcggccggcgtggccgtaaagcttgcactccatatcccgtcccagttccgggctgtactccttgaaatactgcatctccatggtgtttcctcctttagtgttactatggtgtcgcccttctcttactcctccacctcatacagcagggtgtggaacacgaagggcagctgtttttcccagctggcctcgcagtgggtgccgccgggcacgatgcggctggtcaggtggatgccccgggtcatcagcttgccactcaaggcagaaaactgtcggcggatgccctcgtggttgcccatctcccgggagccgtagtccatgtacagcaccgtgccgggggaaagctttgcacgccccacaaggccggaaatcttatccggcgccacccagatggaaggcgacagtgccgctgcgcggctgtaagtatcgttatattgcagcagggcatacaggctcatcagtccgcccatgctgctgccgccgataaaagtatttgccctgtccggcagggtgcggaaattctggtcgatcaaaggcttgaaccggtggatgaaccagctcatggtggcctgtcccttgccgtcaaagtggccgtaggtggggtcatcgaagcggtagggggaatactccaccagacgctcgttgtttgccccggcgttgcactcgatggccgccacgatcagcggggtgtcggtatagtccagataatccgccacgccccagcttttgccgtaggtggcatcctcgttgaaaaacacgttctgcccatcgaacatatacagcacggggaaccggcgctccggctgtgcttcgtacatggtgggcaggtagacatacacccggcgctgctcggtgccgttgaccgccgggtaactcatgctccattttttgatcatggtgcttctttcctctcaaatcttcctgcaaagggtacaggcggcaagcccacgccctttataggtagtgtagcaccatgcggcgggaattgcaatctttatgcgcaaaggcgcggcgggacgatttagaatgcgctccgcttcgctttgcgcatcatcagcggaaatattatttataatttcgcaattctggaaaatctgcggagcttgtcggggcaaagcccctccatctgctaacgcagaccgctctgccgcttaaaagccccactggggctttcattgctacgcaaacgcggattttccagaattgccttttcacgggaggagccgtgacggcaaacggcatctgcggtgatgcaaaagggactgttgccccagacggtgtgcaacagtcccttaaaaagccgtagggtgacaggcggctcaatatttcttttccacaggcacgatccagcccttggtatcgggcagcttgccccactgcataccggtcatggtgtcgtacagcttctgagtgacagggccgatcttgccgtcgccgataaaggcgtgctcgcccttccagaccagctccttgacgggggagacgacagcggcagtaccggtgccgaacacctcttccagcttgccttcgcgggcagctgccatgatgtcggcaatggcgatcttgccctcgacgacctcgtagccccagtccttcagcagctcgatgcagctgcggcgggtgacgccgggcagcacggtgcccacagtggcggcggtgtacaccttgccgtcgatcttgaacatgatgttcatgctgccaacttcttcaacgtacttcttctccacgccgtccagccacagcacctgtgcgtagccctgctcctcggccagctcgccggccttgatggaagcggcgtagttgccgccgcacttggtaaagccggtcagacccggggcggcgcggatatactcgtcctccacgtagatgcgcacggggttgatgccctcggcgtagtaagcgccggagggagcgcagatgatgcagaagatatagtgcttggaagcgtgcacgcccagacccacatcattggcaaagatgaaggggcggatgtacagagaagcgccatcggtgtggggcacccagtcgcggtccacatccaccagagcctcaacggcctgaatgtagtcctctaccgggatcttggggatgcacagacggtcggcagaatcctgaaaacgcttggcgttgcagtccgggcggaacagctgcacggtgtcgtcagcggtgcggtaggctttcatgccctcaaagatctcctgtgcgtagtggaacaccacagtagcggggtccagttcaaaggggccgtagggaacgatgcgggcatcgtgccagccctcgccctcggtgtaatccatgacgaacatatggtcggagaactttttgccgaagccgagcttcgtctcatcggtgggctttgccttgggcgcagccgtgcgggtgatcttgatatccaacatagtgagtttccctctttccttttatgcgcgtgcgcacgatttccggcgctttatgacacaaatgttggtttctattataatattcccagccggttttgcaaggaatcacaaaatgtttcatctttccacccggtaagttgcaccaaattatgagcacagtggtgtgcaaactgccaaatctatgatacaataggggcacaaagcactttgcggggcacagccccgcttttctatggaaggagcatactgccatgatcgacagcgttatttttgatatggacggcctgatgttcgacaccgagcgggtgtgggcgaccctgtgggagccggcactggccaccctcgggctttcttataaggaagggctggatgttgccgcccgcggcacggcgggggattccatgcgggcggtgctgcgccgcttctatggggaaaactgcgacacggacgccatcattgaggcgctgcacgcacaggcggaaaaggcgtttcaggcaccgccgcccaaaaagcccgggctggacgagatcctgacttggctggatgcgcagcacatccccatggcggtggcttcctccagccggatggcgtctatccggcatcatttggacggctggggtctgacccactattttaaggtgatcgtctccggtgagcagttctcggcttccaaacccgacccggagatctttctgcgggcagcggaagcgctgggcactgtgcccggccgcacccttgtgctggaggacagctacaacggcgtgcgcgccggtgccgccgggcactttgtcaccgtgatggtgccggacatggcccccgccgatgacgagatgcgccgtctgtacaccgccgagtgccgcgacctgtacgaggtgctggaaggcttgcagaaggggagattctgattgtgaaaatacaatgccggacagcccgcaggatgtccggcatggtgttttctttattcttcaaattccagatcgctgggctggatgaggtcaagctctgcggcaggctcagctacaaggcggcggctctggttgaagatggccttttccagcgtgttgcgcgccagacggccattgccggcggtgcggctgtccagcgcctgacggcgcttgtagtaccccagcagcgggaaggtgcagctctcggcaaggcggtagcccttgccctttgccagcacggcggtgatgtccagcagctcgtccgccgtatagtccgggaactcgatcttgttggggaagcggctggcaaggccgctgttgacggtgaggaacacctccatctccttggtgtagcccgcaaggatgaccaccagctcgtcccggtgatcctccatgccctttacaagggtgtcgatggcttccagcccaaagctgtcctgctcgccgcggtacagactgtacgcttcgtcgatgaacaaaacgccccccagtgcgctctcgatgacgctgttggtcagcggggcggtgtgcccggtgtagcgccccacaaggtcggcgcgggtcacctccaccagctgcccgccccccagcgcgccgatggccttgaggtactttgccaccagccgggcaatggtggtcttgccggtgccggggttgccggtaaagatcatgtgcatggacaggcttgcggtcttgaagcccgccgccgcgcggcgctgctgtacctgtaaattgtctgccagaccgaacacatactccttgaccggggcaagccccaccagcgcatccagttcggcgcggatctgctccaccgcgccggtgtaggccgccggcagcaggctgaacaggtctgccggggcggcaccgttcagcgcaaatcgcagcccctcgggcgcggcggtcagcgccaccgtgccggacagcttcgcatcggtctgcaaacaatactcgctcagggcgcggaaaatgcgctcacagcagtctgccagcccctctgcgcccttttccttggagcactgcgctgccacatagtcccgcacctccgcccccgcggtgagggtcagccccagacggctgtgcacccgctgcgccagcgcgttcagctgctgcgccgccagcgcggcgagtgcttccggggtgaagggggcggtctggcacacatcccctaccgccgccacaaaggacgcgccgaatttatctgccagcgcctcccgtcccttgcgggagaagaagatcaggtacttgccgcaggggtcgatgcggctcactgcaccgggggcaagcgccgtgccggcttccaccagaatgccctccttgttgaccagataccggctggacaaaggcgcactgcccttgaccgcgaggtcggagaggatgcgcagaaagccggggtggcagctctcgtagtgctcgaacaccacgatctcgcccggggcgtgcagcgcagcgtacaagtcctgcaaaaacaacttttccgcgccggggtcggggtagagtgcgagatccatcaccgccatccggtcgctctgcaaaagcccccgcgccgccatgatgcgggcagtctctgccagcgcaaagtgccgtcccgtacccggagcgccccacagcaggatcacattgcgggcggctgcgccctcggtgcccagcacaaaggggcggcgcattgcccgcaccacgctgtccacaaaggcatcctgcccgaggacggtcttttttacctcggcggcaaggccctcaaagctgcccagctgctccggctttgtgtccgccgtgccctttgccagcaagccgtctgcttccatatcccgcagcatctggcggctgtcctccagcgccgtctgcaccccggcatcctgcgctttcagccgggcgttctgctgtttgagcatttcgtccagctgcttttgctgttccagcagcgatgcgttcagatcaggcaggccgctgcccgccgtttttttgggctgcggctgtgcgccgccgaacttcagtttgccgcccgcgccgaacacgccgttcatcaagctttcccaatcatcggtatatgccatggtgctgccctccatcggtgtttttcttccagtatagtgaactgcgcggcattttgcaagggattccctcttgaaaaaaagcctgttgtccgatacactgaagataacgaatcttataagaaggaatgaagctgaccatggctgcaaaaacgcctgcccagtggaaaacactgtttgaaaacgaacccttccaccgcgaaaactactacaccggcccccttgggccggactacacccccggcggcacctgtctgcggctgtgggcccccaccgccgaagcagtcaccgtgaccttataccataagggagacggcggtgccgtgctgggcacaaagccccttgtgcgcggggcacagggcgtgtggagcatctggctgcccggggagcagcacggccgctactacacctttgccgttaccgtaaacggcatcacccgcgagaccggcgacccctacgcccgggcggcgggggtaaacggcgtccgcagcatgatcgtagatcttgcccgcaccgcaccctccgggtgggagcgggatgtgcgccccgctatccccccggcgcagcgcgccgtgtgggaggtgagcgtgcgggacttctcgcaggatgccgccagcggggtgcgcccggcatggcggggcaaatatatggcctttacccagcagggcactaccctgcacggcgacggcatccaccccacctgcctgaactacctcaagcggctgggggtaaaatacgtccagctgatgcccattttcgattttggcagcgtggacgaagcaaagcccctgctgcggcagtataactggggctacgaccccaccaacttcaacgtgccggagggcagctactccaccgaccccacccggggcgaggtgcgcatccgggagtgccgggagatgatcgccgccctccatgcggcgggcatcggggtagtgatggacgtggtgtataaccacacctaccgcaccgaaaatcccctgaacaataccgtgccctactactttttccggcagaatgcggacggcagcttttccaacggcagcggctgcggcaacgagtttgccagcgagcgccccatggcgcggcggtacctcatcgactccatcctctactgggcgaaggagtaccacatcgacggcttccggttcgacctgatgggcctgtacgatgccgagagcatcaacgcggtgcgcgccgcactggatgccctgcccggcgggcgggacatcctgctgtacggcgagccgtggcagggcggtgccagccagctgcgccggtacgaagccaacaaggcgaaccttgccatgctcaacgagcgggtgggcatcttctgcgatgacacccgggacgccatcaagggcggctgcttcgatgcccgggaaccgggctatgtggagggcaagcccggcagcttctgggatatcggcgcggcggtggcggcatggtgccgcagcgaccgtctgccgccccacgcgcccagccagatcgtgagctacgtttccgcccacgacaactttaccctgtgggacaagctgctctgcgtccggtacgaaaagccggagttcaccgcccgggacagcgtggcgctggcgcagaaccggctggcggcgggcatctacctgaccagcttcggcctgcccttcatgcaggcgggcgaagagtttgcccgcaccaaaaagggcgtaggcaacagctaccgctcctcccccgccctgaaccgtctggactggaaccgtgccgagcagtaccacgccctcgtggactactaccgggggcttctggcactgcgggcagcctttccccggctgggcagcaccgaccgtcacgccccggaggctttgcagttctttgcgctggagcagccgctggtgggctggacgctgcccgccgtctggggcgacggcgcagcatggagcgctttgtgcgtcttttataaccccaccgaaaccgcctgcaccgtttccctgcccgccgggcagtggaagctgctgagcgacggcacctcttccagcctgtggcgcggtcaaagccgcatttttaccggcaatgccacccttgcgccgtacagtgctactattttgggtgcggtgtaaaacgatttaaaatggcttccgctgcgctctagccatcttcagcggaaaaattatttgtgatttgtaaatcgggaaaatctgcggattttcccgatttactttttcacgggaggggtcgtggaggaaaacggcatttgccgcgccgctttctgcgaaagcgcggcgctgcgggcgggtgctcgctcccccttggggagctgtcgcgcagcgactgaggggcttcaaattggcggagccggaaaaaacggttaaaagatcttcacgccgaacaggcgtgaatcttcagttttttccggtgcagcccacttctttggggttaaaaggggcgagcagcccctttttcgtggctccagcgcgtcgaaatcgctggcacttttctggttctcttttggtgtcaaaagagaacatcccccggcagtagcctctgacccagcgatacgcagtataaacaaaaaagagagccttccattttccggaagactctcgctttctttatgcagttttttagctattctctgcgcccttttcgccaagggtgacggtgacggtctgcatctgaccgccgcgtgccacggtgatctcgatggtgtcaccggctttgtggtcctgcatcagggtgccaaggtcgctctgggtggcgacctcgctgccgtccatgctcacgatgcggtcaccggcctgcaggcccgccttgtcggcagggccgcccttgaccacttccacgatgtagacaccgtaggcgttcacgcccagctgggcggcagtctgggcatcggtcacggcaaagtagctgatgcccagatagggacggccggtcacatagccgttttccagcagctcctgcgccaccttgacggcgtcattcaccgggatggcaaagcccagaccctcggcatcgctgtcggaggactttgcattgacgatgcccaccagctcgccgttcatgttgaacaggccgccgccggagttgccggggctgacggaggcatccatctggatcagggacatggtgttgacagagctggaaccctgaatgctgacgctgcggttcagtgcgctgacgatgccgctggtcacggtgccgcccagctcacccaaggggttgcccacagccatgacgctttcgcccaccttcaggttatcgctatcgcccacggtggcgggggtcaggccggtggcatcgaccttgaccacggcgatatcactggtggtatcctcgcccaccagcgttgcggggtaatccttgtcgccgatgctcacagtgatgttggaagcgccgctcaccacatgggcgcaggtgaggatatagccatccgagctgatgatgacgccgctgcccgcgccgctctccacctggctctgaccgtaccacgaccactgggagtagaccacctgctcggtggtgatgaccaccacgctggggctgaccagctctgccacctgtgcggtgctcaggccggtgccgctggtggcgctgatggagttgccggtgctgtcggtgctgctgtcagagctggcagggcgctccacctgctggatgaccaccttgctgccgccgccgtattttgcacccacaaagccgcccgcaaagcccatggcagctgccagcaccagcgccacagcgctgcgcaccagctttccgccattgaacttcttctttttgcggcggggcttttccggctgctgcggggcgctgtactgcggctgctccggcggggtgggcggcacgctgccgccgtctgccggggcggtatacgccgggcgcacgggctgtgcttccggctcgttatactggtttgccgtgttcatgccgctgctgcccacgttggggtagccggtctcgttattggaagcggaataatcatattcccacttgttctcgttttccatgttactacatccttccctcaaaggccggtccgcagggacatctgttcctttgaactgtccctattgtaaccgtcaaatgtgaaaatcaatcgcttgcgccgtgaagaatatgtgaaatgcggtcctgcttttctacccttgacagccgcgccgccgcttgctattgtaagggaagaacatcggcccgtcaaggaggagctttttatggaactgcgccgcaccgaacaggggtttgccctgtataaagaaaaggactgcatcggagagtgcaccctctcccccgcccccaagggcgcacagcttgccgccctgtgcatcctgccccggtggcggcgcaagggctacggttcctacctgttaaaagaagtattgcgcagctttggcggttatgaccgggaaaccgccaccgtttttaccgccccgctgccggaaaacgccgccgagcttgccttctggggcaaattcggctttgccgccgagggcgggcagctggtgcgccgccgcaccccggacttaacggcggtcaagttcgtgcaggactttttagccgcccggctggtgcacccgcagctgtgcgtggacgccacctgcggcaacggcggcgacaccgcctttctgtgcaatctgaccgccccctccgggcgggtgctggcctttgacgtgcagcccgaagccatccgctccacccgcgcccggctggaacaggcagacgtgcccgccgagcggtacagccttatctgcggcaatcatgccgacctgttacagtatgtgcagcccggcaccgccgatgcggtcatgttcaactttggctggctgccgggggcagaccacggggtattttccaccgcgcagagcagcattcccgccttgcaggcggcgctgcaggcggtgcgccccggcggcatcgtgagcgccatcctgtacagcggggcggtcatcggctcggaggaaaaacaggcggtgctgcgttttctgcgggcacttccactgaaaagtttcaccgttctggtgtgtgattttgccaattgggccgaaactgcccctctgccctgcctgatcctgaaaaaataacgaaaacccttggcttaacagtgataaggaactaatttacttatcaactgttagctgacggtttccggggtgcatacggacaaatcccgtctggtttctaacaggaagtcagatgggatttttgcttattatttgattttggaggacataccatgaaaaccttattgtcttgtgagtttaacatggatactgcctgtgtggaattgaaattcactgatggcagcttgattgctattgataccattgctgtggagaacgagattgctgacaatatgtatcagcggtcagagcttgactatctgatttacaatgaccctttgagctatgcagatttgatcttccatggcgattccgaatcatatctgaaagcagtcacggaatataaacctttagattaaagaaggaaaattatccgtatgacataaaagattggactttacatttggtgattccataaataggtaagtctgtgcgaccaattccgtaaaaaagaaagagccgatgatctgtgagttctctcacaagttcatcggctctgcgtcttagcgtctggctctctttattcttatggcaaccaagtaaagacatctaaagctgccaaaaagctattttgaaatttgggacttagtatgcagagctttaatatactgacaagtatcatcaaagcgctaatgacacagatagcaaatcccaaagtaccattcggcttttgaaaaacaaatatctgcaaaataaagctcaagagccccataaacaatacaattccatataaaatcaactttttcttcttagtcatatgagctttccctcctcgatgttttatgctttgcgcctgtgacaatactgttcctttgcgtggcaagccctgcttttttgttttgggtgttagagacttacatcttttcgtaacagaaaaattgcatatatcaataagggaataaaaaggcaaaaattcatcaaatacacccctgcacttggggtgttactgttcgctatcacttcatttgttgtttgcagaacagcaaaatcgccaaagccagccgctatgtcgtacaaactgtgaatgattccgcaccacagaaggttccaattcgttctgatcagaagtgctgaaaaggctacgcccataataaaagagtagcctacctgcgacagcactgccccagtgctaacttctgtgtgaaaattcatcaagtgtatcagcccaaacacgagacttgacgcaaaaacagcgcagatgattcttctatggctgtttccaaagagttctataaattgccgcagcagcacacctcgaaacagaatctcctcataaaacccgatggcaatacactctaaaaccattagcaggagcagccgtggagttgtatgagccacgctgccaatttctaaattggcagcgatatagacaaagaacagccaactgagggcaaagcaagttttatcaattcgataggcgaatatccgcatatcgcttagctgagataaaatcggaagaagcacagccatcccgaatagtctgacagctatgcccatcccatattttgttcccaaatcactggaatccagttttattcccacgcaagcagatccccatgcaattcctttgggaagaatatgcaatgtgaaaacgatgcctacgagtacgaccaatgataaaacgagtattgcttttattgctttttgcggcgacattatatctcggtgtatcatctcacaacgtatctcccaagaatttatgttcgcatttggtaaatttccaattcccgatctcaatttttttgccgttcatacgcttggaaagctgacgtgtttctataaattcgtccgtcacggtaacaaaaaactgcttgccgtctctttccaccaaataaaactgtttatccgcgttttttaccgagttgattagtccgggaatcccgaacggagcatcggtgaggatgccaagcacattgtcaattactttttcaccctttgtcagtttctgctccccgagaagggtgtagatctccgcatcggggaacttgtcacgaaccgcacggtctttccgtttacccttaccgcccttaccgtattccgataagttatacggttcacgcataaccaattcgtcaatcgcttcgccgttgtcgagcatataatcaatgctcacattcagtaatctggaaagagttttcagattatctacatcgggaataccattatccgtttcccattttgcaaccgcagaacgggaaacacccaatttctcagataactgttcttgggaaagtcctgcctgttttcgggcaatttttaatttttcacctaatgtcattgtgatgacctccttgattttttgatgaacccaatgtaatctgaagcgtcatcaaatgcaataaactatctatgacaatgctgttactctgcgtgacaattcctgttttgcctatatattttttctttaatgaaaatccgcagttcaaagaacagcataaacagcgttgcaattaaaaatccaatcatcagaatcctatgacagacagcaaaataggcgatatatgccacaatagccaataagtacacgataaccagtatgtgccatttcttagcagagctatcggcaattattttcttttttacagcaacatctccctttatcagctcgtccaagctcagcccaaattcatcactgattgcaatcagattggcaacatcgggaatacctttgtccgtttcccatttggtaattgcctgtctggacacatttaacttttcggcaagctgctcctgtgaaagacctgcctgttttctttgctctctgattttttctcctaaactcatttttgagtcctccttgcttttttatttgcaggctcatcatagcgatttagcaggaatttcacaagaaacaaccgattacatttatgctacttagcgtagcaagcattatattctattgctttgagaatgaacgaccgataataaatactccgacaagcatttctccgacagatattccagccattaagccggatagaaagtccctgaaatccgttccgccgatcaactgagaaaatgcaagcaaagcgattcccattacaatcagcaggataccgaagattgacatcttctgcttttccaactgctgtatccgccggagcatatcaagtatttgttcttcgtcaaacacccgaatactgctgtcagccttgacctcaccgtccataagctcggacacggtaataccaagctcctgacacagcggttttacaataccgtagtcaggcatacattttcccgtctcccttaattaaagatattgttgggtaaaaaagaaaggtcagtcgattttgccgatgaagcggtagtagatttctacttcctgctcacggcttccgtcctcgcccttgacagcttcgtggacggttattttttcaattagagtgttcagaagttcggcggtcagctccacagggttgacatactgtttcatcagggcaatccacttttcagcatccgctgcggtctgtacggcggcttccatcgtttcgtgaagctgtcttatttttgtttcaagctccttttgctcgttctggtacttctcggacagcatattgaagttatactcggttatgcgtccggcagaccagtcctcatacattttagcaaacagcccgtcaacctcggctttacgcttctctgcctttttcagctccgcagcctgctttttcttcgcagagtttctttccctgtcgctggcattgagcaggcgtttcagcagcttgtcctcgtctttctgtgccagcatagaccagtattgcagtcttgcaagcacataggcatacagtacatcatagcggatatagtgcatggaacactggcgtaatccctgcccgttcttgctgcaatggtagtacccgtatgggttcttattctgcttgttttccccataggctaaagaccatccgcagtctgcacattttatcaatcctgcgaaaatctgtgtcgtaccgtttctgcgtttcctgcgtctgcttgcaatcagctcctgaactttttggaacacttcttcagaaatgatggcttcgtgggtattttctacacgataccattcttcctgcggcttccgcacctttttcttgttcttgaatgaaatgttgctctgcttgttgtgaatgctgtgaccgatgtaggtttcctctttcaaaatgctcttgacctgtgctatcgtccacgcataggctttttctgcgggcgcaccggcgtagatattggcgaaagtcccgtatctttcatagttcagccagccgggggtaggtactttttcctccaccagaatccgtgtaatgctggcggctccacgcccgtgtacagcaaggtcaaaaatcttctctacaatccagcgtgtttccgggtcgatcagaagatgaccttttttgtccgggtcttttacatagcccagcggtgcataggctccatagtgtgcgccattggcaaatcttgtgcgcatggcagccttgacctttttgctggtctgtcgggcgtgcatttcattcaggatgtttaagaacggtgcaagctcgctttctccgttgatggtgtccacattgtcattgatggcaatgtagcgtactcccttgctggggaaatagatttccgtgtactgaccggtcaggatatagtttcttcccagacgggataagtcctttgtgacaacgcagttgattttcccgtcttcgatgtcatcaatcatcctttggaaacttggacgctcgaaatttgtcccactccatccgtcgtcaatgtactcgtctacaacggtcagcccatgctctgcggcatactgtctaagcatcatgcgctgggtctggatactgccgctttccccctgtaattcatcgtcacggctcaatctcaaatatagtgcagtgttataaatcgttgtattgtatggttgtttcacggttaaaaatcctccttctaaaagaaacaacccacgcttatacaatactcgctggtacaagtatatcataagcgtgggctgattgacagtcgttattccgtattttttcaggaagcggcggcagcgtgctggatcacatcttccagtaggctgtcaagcggcttcccatcctgtgcgaaatgctccgataccttgatacggactttccccatgacaaaatactgggtgccgtctttttcggtaagcagggtgccgctgttttcgttgttgctctcgtttttgttttttgccataggcagttacctccataaatgaaatatgcccgacaagagaatgtcaggcaggtgtacagccgcagactgtctccgtgtcaaccaaaccgtgtcaaccggcagaaaagactttgaaaacaatccataggcgctctattattactttttactttttctttgatttcttggttgacatggttgacaaaggagagaaatgccccaaatatcaggcttttctccgtcaaccggctgtcaaccgaagcgtcaaccaaactgtcaaccggtggcttttcagaatggcagttccatttgccgggcttcttcttccgtgatttctcgaaaaccgtccccctccggcggagcttggttgacacgctcccagcctttttgagaaccgtatttcttataccgcttcgggcttttgtaggctgcccagccctgtatgatgccgcccgcaatgccggtattcataatctcacagattgcccgtgtctcccagtctgccggggaatttaagttccccagcgcttcctcataaagctgcttggagcataccctgtcaccggtgtagtcctccaaataggcgtagatcatgccagcctgtgtgtcttcctgcatgaagtcctgctggtgggcgttcagatatcggttcatttccatactgaatgatagcttatacttcccactgcggtaaaccgtcatggcttccgcccacatctgttcgatatacgccctcgccgccgcttcatcatccagtatgtgaacctccgcccgttccgggtacaccgtcacggggagaaagcgccggttgccggtgcggtcacggggcaaaaagtcctgccggttggtcgtccctccgaatacacattgccgcagccggtctgccgggtgtgtctcatacggcactttgtaggtttctttctggcggcttaggaatgacttgatttcctcaatactcttggcgttggctgtggcaatcatctccgacatctcgataatccaatgcccttgcagcttgcggtacacattttcatcgtccagctttttcaaatcgtctgaaaaccattcgtccctgcctgtcagcagccggaaaaaggtagatttcccggctccctgaccaccaaccagacagagcatgacctcaaacttgctccccggtctgaatacccgccggatggctcccatcaggaacagtttcaaggcttcataggtgtattcgtccgtatcggctcccagaaagtgatgcagggcgtaacggatgcgctctgtgccgtcccattgcaggctgttcaggtaatccctgactggatggtagcggttttcattggcaacaatcttgatggcgctctgcacctttttctcgctggtaagcccgtaattttcttccagatacaaaagcaggtagttcatgtccatgtcggtcagcgtggtactggtgcgctcccagcccagcggcttcacaatgtcaatctgctccgtcaaaaggttcaggcgcagcgccccgcgaaacagagggtcacgctggaacaccgtcaggcagtttcggatgctgttcttcacgccgcctttctgcgtcccctctaatgtttcccggatttctgccggtgtctgcgccggttccattgtgtccatcgtccttttgaccgcttcctgcgtttccggcggcaagctctgaaattcgctgttcaagccgcagcacctcctttccctgtgcggcgatcaatgccgctttttcttctatttctccgtataacaaaatatccaaaaggtattctgtgtagcttatcctctgcaacgcttccacgaaaagaggatgccagatggcatcctgcggctgtggggcgtatgctgttttccaatgctccagcaggcgcagataatcgcatagcacccggaaacaataccgttccgtttcctgaaatctctgctccgctgatttttgtcggggctgtgacctgttgtgacgcttcctatctggcggcgcattgccggatttctcataggaaacgccgaagtcctccgcaagcctgaccgcagcttcccgtttccccaatccatgcagcaaagcggcaaagtcgatcacatccccagaagccccgcagccgaagcagtaaaagcggctgtccactttcatgctgggcgtgcggtcattgtggaatggacagcagaccatgccgtttcttcccacccggattccatagaatgaagcagcctgccgggtggtaacagactgtttcaccgcttcaaatacattcaaatactccctccataaaaataccggcagcggtaaagctgccggttatatcatagctccatctcatggttctttctctgtacttcctgtggctgctccctccggcgcagtgcggtatctacggcgttctgcacctgccgcagccgtatgacttccttcaggagcggcttgtgctgcggagacagttcggcatactctgtttttaactgtgcgtattcctgtttccatgctttcatggcaatgggttttccgtccagtttttctttcagaatacggcgggcggcataaaacagccgtaactccgcatcgtgggatgtttcaaatttctccctctgtttcttaaacttgatattgttcaattccgtatggacaggttttagccgctggtaattctcgccctcccgtatcaattcctgcaattcctttatccgggcggatttctttttcatggagccgcttaatgcttcaaattcttcactgacagaggaaagacgctcctgcaaatcctctaatgtgagcagcttgttttccgtcagataattgacggcttcagcaaactgctttaagtttccggttctggctttattgctccatgctcctgcgttgcgctggttgtaataagtaattaacaggtcggcaaggctcggtgtctggggtttggaaagttcttcttttacctctgccatccagacaaacagggctttgatcttcttcctcacatcctgcatgagccggttggtggctttaatccagcggttcagttcccctttctcggtgcggatgccctttgcttccatctgccggacattagctccctcgtggacagtaggtatcaggtcaagcccctgccgcacataggaacggtggtcgatacgtacatccagccctttttcctcaaattttgtattaacggcagccgcccactgctcccgccagtgttccagcgtttccggttcatgccagtctgttgtatggacagcgttaaacatataatcgccgtttttatcccggattcggtttccatcttcatcaagaagatattcccgacgctgtttttgtccccatgtgccatccgggttcaaagggcgcatggttgtcatcacatgaaaatgcgggttagggatgccgccgtcctctttctccggactgtgaaaagcaagatcggcaatcatgccttttgccacaaactgctcctgcacgaacttcctcgccagctccatgttttcttccagcgtcaattcattctgcatggcaatatcaaatgaataggcaagctgtgcttttggatgtttctcgcagttctccacagcattccagagggtcgcccggtcaagatatacttccggtgcatggggcggcagcatgatttccgaagcgattacgccgccctttttggtgtagtcgctgacttctccatagtagctgctgtaaagacgctccccggctcggtaggctgcgctggcaatggcgctctgaccggcgctgcgctttatctgtgcgattgaaaaatgataaagtgctatccttagtcaccgcctttctcctgcccggaaatacgggcgtggttctctgcggcagaccggatgaaatgctccgcctgcggcagattcaaaatgctttccatgagggaataaaattccgcttcggatagctcctttgtctgtggtgcaatgctctcaatagctgccccacgggtaatcagccggtgcgtcctctgtttccgggaaccgctttccagatacgcctgccggtttttcaaacgctgcattttccgtttttcctgttccagcaggacagtggttttttcatattcctgcttcaactgttccaaagatttttccatgttctcacatcctttgctgataagataaagaaagaccatccgcagacagtccgtgtgtcagtgcttctataaaacccgatgaaaagggaaaaccgcagagcggatttctctttgcggcgggtacacaggggatagccgctttagcggcgcaagggggtgcagccgccttgtcggagcgaagcgaacgcagacctcggattgctgattttatcagcggcagaggtaagctccgcaggacgcacgatacatggtctttagactatgtatagaagtgcgcccttagttcctaagggatttttccgtttccggcagtcttgtcctttttcttggaacgcttggaaagatacttcgggcagtcaaccacaaccgcccggaagctctgtttacattcgtgctggcatttccggcacagttcgttgtaagtgatacgactgcggtcatttaagaagaaagaccattccaaccgccgcttgttactcattcttgccataaccggctcctttctccgtttctatctgatgtacgcagataggctgttttgatgtagcgtctcggtatcatttttaaggttttttccctctgtatgcccctttggaaagtgcggcagtattgcagtcagggaatgatacctcacgcttatttgtcgcttctcggtacggtttcggagccttttgccatccattcaaagaaagcaattttgctgaccttgataagcctccccctgcggaacgccggaaagccgggggtgtgtaccagctcataggcgctcgctcttgaaattcccataatccgctgaatgtccgccacatccagaaccagcggtaaatcctcgtagctgttcaatctctttttatcgttcattctgttcctcccataaatcaaataggttaaaatgcttcctgctgccgctctccccaaaagccgttttcctgccccattcctgcggtgtttccctgcattggtgcgccggatgcgtcacttctcctgccggtcatatcctttttggacggtcattcacttgtcaaggtactgtgcggtacgaaattaccaaccgcaatcatcatagcgtactatccttgacaaaacaatgattctgcgataccatgagtgtaacggatataactgaattatataattaccataaacaaaggcaggggatagggatggagaatcagtttatacggcatgagccatgttttgagaggattttgtttgtcctgacgctggacaggaagaaaatgaaagagcggattttgattggggaagaacagcagatccgcttccggctgaacgggagccaaaacgcagaggtgctttgtgatatgacacgcccgctgggaacttttttgataaactttgagcgtgacacggacagagattggaacttatacgggctttctccgctgcggcaagccctccactccaaccgacggaaacagccggagctggagcagacggcaagcgaatttctctggggaaaatatcttagcaatgaccctctgaaaatgtatgtggcgttccgtatctggaacagctatctgcttgccagagaaccccgtgaccgtaacgctgcctgtgaccgcttcatggataaaatgagcagcctgaccggggtattccataacgaagccatgagctttgacagggagacaggaaaaccgaaacattttcaagctggcagcctttatttcaaaggcgcaccgtcagaagatacccggcttgacctctggttaccggacaaccggcgcacagaagaatgtgtgtctgcctatgcgtccctctacccgttgattacctattatctgaacaggctgaatgactgggggctttgcttccggcggtgcaaggtctgcgggaaatattttctggcaaagagccagcggtatgagctgtgcagcgacaagtgccgaaaagcacaggcacttcaaaacaagcgggaatttgacgagagggcaagagaaaataactatgacctgctttataaaaatgaatgccagaactggcgcaacaaaataaaccgggtaaaaaataccgcaggctttccggctgaccgtctggaaaaaatacaggctgccttttccgactttaagaaagaagccttacagagaaaaaaggctgtaaaaacaggaacggccagcccgaaagaatttacggactggctgtatcagcagagtaatgtaattgtgaagctgactgaatactaaattttttctcgttgtgaggtttctgtgacatttgcctgatggcagtatcgaaattgcagtaattactcatgcaaaatgcttcttcgttttatacactatacctatatggtggagcaccaaatgaaaggagcaaaaaatatgtctgagattcaaaatgcgattgaagtaaagaacttaaaaaaaggttttggtggcagagttttgtttgagaattttagcctgaatgtaaaagcaaatacaatccatgcgattattggcccgaacggttctggaaagacaacactgctacgcttgattacaggggtataccagccaaatgcagggacaatcaacattgcagggaaatatgcaatggagcttgaaaatgactatctgtatgaagaacagactggtcttgaaaatttgagaatttttgggaaatactttggatttgaaataaatgatcgttcagacagttattgtacgcaattaggattgaccgagcatttaggaaagcgtgttagcacttattctaaaggaatgaaaagaaaactgtcccttttgattgtgattatgatgggacgggatattctgctcatggatgaaccaacatcgggtgtagaccccatatccagagtagaaatccgtagtttgatagaggctctaaaagctgacggaaaaacggttattatcacttcacatgaccttagcgagattcaaaagtgcgctgatgatgtatctatgattaaaaatggcagattgctgtttgataagggtattcaagaaatgcaaggacaatcattggaagaaatctttattaaggagggcaatcggtatgagtaacatgggaaaaggcgcagtctactatcttaccagaagcaaaagcctcctaattgatactgcgattgttgccattctggcaacttttatgagctttgcaatgcagatggacgccttgcagtctaagggagaggattatttagtcttaatgctctatgcggttattttgggtcttacctccctgcaatccggtgctatgattgtagatttgacagcaaaggataagttaagccggagaattgaattttttgcagcttctggaattgcggtaaaagagattataaaacagtattcggtacagattttccgcttttctggtattatcccgttctttgtttttatgagttgctattactttaccgactggacaatgagctttgggcggatcgtatgcgtttatcttagtattcttgtacttagtttttgtgagattgtcgctttgaatatcattgtactggatgtgaaacgagtaaaactgttcaaaaatgttctgttctttggtaattttgcactggtttatttgattgcgatgtcggcagaacgaattacagagcttgtgaatcaacatcatataggaattgactatttgattattgtggttgatgttgcactttgcatgatgtttgcactattaagtttctttaagactcggcacatgagcaacgaaacagttatcaggagggatggcgaatgggtttgataaccttaaaccttaaaagggtattgaactggaattttatatttatgagtgcggtagcaactatcttcggcataatctctctgatgaactttggggatatttcagagaacattgtatttggcgttgatataaagtattttatgcttgatggctacctgtgcttatttatcttttttgccggagaaataagcaaggatatgttgcagcaagaaaaaattacaaagagaatagaatggaaacttgctaatggtattaaaatctcaagtattgttaaagagaatctgctatcactatggattggaacgctgattcttttgtttcctctgcttttgatgatttccattcgtctgccaaaccttatcttgttatcaggcacctattttctgatccttagcatattgtattcggcatttataaatgttttgattctctggattagaaatatgaactggtttaagagtattcctatctttgcaacactgcttcatattttgctggttttcttaaaatgtgggatatttatgaaaacgaataatgtgtgggtgttgctactattttctccagtgagtataatagttttgactgcgtgtggtttatgtctgatgactaaagaacggatcgtatcatcatattactaacataatgaattttagctgaaaggaggggggtctatgcaggataaacgcttctatccgtatctgtttcttcatgcgggtattgtgactttatgggttatattggatagaacacataaaggaattgcgaatgacggagccatcaacttattgtcgattgccgtcttgctttgttatttcaatctgctctatctacatgtaatgacatcacggcgaaaggcaacaatatctgaatgtggctggaacctgctttctgtttcctttattgcggcgctgatgtatgatggattttccaccttatacacgggtgcatttctggtttttgcattgattatcggaataatgctggtaagaactgacgcaagccggggaaaaatggttcgcttgctgtttggaattgcgtctatcatactgtcgtttttcaatttccgaattctacctgcggtaactatgttaattggaatgttcgtgggaattttccttgattataaatatataaatttgaaacaggttaatattcttccgattgcccagaggaaagcaagatatgtccttgttttcatgattcctttgcttacaatcgtactttattgctttgatttgtccaccctgcaagtcaatgtattttttcagcttataatgcttttatttgaggcttttgctgtcattcatcttggcgacatggaagctcgttacaacgagctgacaaagtattatgaattaacgaactatattgcaagtgagagggaagatttttcaatgctacttcacaacgatgtgcttcaagatattggaggtgccaaaaatcttctgtcgcttcgctcaccagctattgatgaaacaaaaaggatattatctgatttggaactgcgaataagaaatatgatgaatttctattcgtctaatatcttttcggggtatgcttcatgggaacatattgaatatatgcttgacgccattaagaagctgtacccaaagaaaaatatatttatagattttaccattgacagcgaagcaaggattgctttgaaaaaagataacagtttggaacagactatgcagataatcaaagagcttgtcaacaatgtttataaacacgctgccgctacttttatccatttggaaatcgcgttaaatgaagaaagtaaactcgtaattacctgtcaaaatgatggagcgaaaccaaatgacattgaaaatattctttcttccaaaggtggcatgctgttcttgacggtgttgataaatgggaatggtggtaacattcagtatttagagaaagatggtattttaactgcaacggcagttttggggagaaaaaatgaagatattactatttgatgaccacaggatatttggagagagtttaagcaaacttctggaagattgggacgcaatctcaatctgtcactatgtaagtaatgaaacagagttttggaatattctttccgtagacgaatgggacattgtattattggatgttaacctaagagatcagtcaaaaaattctggcattgacctgatagaaaaaatatataacaaaaacccaaaaacaaaagtggctatgctatcctcttatgatatgccggtttatagacaggaggcacttaaaagaggtgctgtaagttatattgacaagtcggcttctgctgatgagctggtaaaaaaacttacagctattagtaaaggtcacaaatccactacgccccctttattaaatcccctgacagatcgtgaagcggaaattattaaggcgattggaacagggaaaacaaagcatgaaatagctcaagaactgtatatcagtgaacggacactttacaaccatatccaaagcatctatgataagctgggggctaaaaatgctatcgaagcctataacaaggctattgcacttggatatatcacacccttaatatgagtttaggcaataagagggacagatatatcagaacacaagtgacaagtatgcacattatgtaagcagatggcaaaaacaagtatcattgaacgacttcatcaaaacaataaagaaaagctgggagcaaaattaagtctgcttccagcttttttgtatttgttattgtatgtggttgactaagaaatattgtttaagcgtgagtttgtgatattgggtgtggtatctttaactatgggaatgcccgttctcccaatttgaaatcgtctgtcttgtcacatataccttttcagccaattcctcctgggacagattaagctccgttcggtatttttttatttgtgcgttcagctccataaattttcctcctttgtaagtgatttgttctcttgacctgctccgagaataatcactttttctctttctgtctatcaaacctgttttacttcgctgaaaatacggtgtcaaaagtatttgacagcacgtaaaaaccttagtctctgtcttagaaaagaattggaatctgttgtgttaaagataccaaaccaagccattttccgttgcctgaatcattgcccctttcggtacttttcgcaataagattataacatccatataatcaggtgatggagagattaatcccataaacgaagaaactacgcatattgtcatcaaccacttcatcgtgatcgggcaggccaagaaaacagcaagagaaagtatccccggaatcataggtgccaatgacatcatgatatatcgtcctctgctaagagctgcagaggatgcagcatatgccctcaactgttttacggatactcctatgtagactttttctccctttggaaagcatatagcatgaagaaattcatgcaagggcatcgcaacaaagaatccgataataaatgacagcggcataaaccacaaatcaaatatgaattcatctacttgtgccttttttgtaaaaactgcaacaaagcatacaatacaaggaataatcatgtatggaattgatgccttaattatgtcatctggtctgtcaattaaaactgccttttctggaatgctttttttcgcaatctctctgtcccacggctgattaccgtcccaaacattttcccagattttattaccattccatattatctgcgccactttattatcctttctctccttatttccagaataaatctccgatagcatttcctaatgttctaccgatattataaaatgtttctataatacttccgccaaaatagaaaacgattatgacagcaatcagtgttaacacacctatcagtatttttggaaattttatatgcttatcattttccaatgcttttttcattacaacatcaatgttctttgtatccacctcaacattgtattttaaagtatagctacttcttccatcacgaatggcagatgtgatttcagatatttctttctgaatatcttcttcattttcataccatccaagctgagttgtatgttctccaagaaccgtaaccttatcaacgccaagcaacagatattttggttgttttttcgttggtgagagtaccggagaagctgttaccttaaaacacgaaaccagatttttggtaaggggtgactcaataaatatctgattagctggcgcagcatgatgttcagatgcattttgtttctcatctgtatccatttcatcttcgtccaaaagcagataatccgtcgtacaatgaaaaagtttgctcatccgtaccaatttatcggtttcaggatatgtaatattgctttcccatttgctgattgcctgtctcgatactccgagaacatcagcaagctgctcctgcgtgtaattgttttcttttcgaagtcttgataatttatcgcctaatgtcatagtgcgtcctccaatcttaataaataattcgtatcaataatacctgtttgctgtctgaaagaccaccaacatcgaggttctaaatgtaaactacaggttgcgcttatgattttaggtggtttataccatattcgtactatttgttcttatggttcaaaggcaactatcgtttcctttggcagtttctcattttcacagttcagaagatacgctatcgccttgttcgcaaagcgatttgttttcatggtatcccaatcagcaagccggatgatctctgctgtgccgttctcaaaatccaatgatatttcgccccattcgccgtcgcagtctgcttggtattcgtagattgcggcggcgattttctttttgcgcttagttttggatttctgtttcaaccggacagcatggattgcatcctcggcaaccagaagttccgtcagtttgtctactgctttccgataggctcgttctgcaccgctggctgtgctgccctcaaacataaccgccagttcttcaaaggtggggcggtctttccatgagccgacacgcccacaggtcatgcagatcgcaagacgcttttcaagcaaggtctgttcccggtaattcagtttctcaaatgcccgctgcaccttttctgcttgtatgccgttccagaggatgtcggtatagttccagctatcgtcaagggcaacatcttcgcctgtttcctcgccatcctcgtctgttacatagaacggttgctgattgcggatgccacggacaactttcagatattcttccgcaagggcaagctcgcagttgtacttcttggaaaactcgctgaccgcatccttggtgttatggtacagccatgccattgaccgcaccattttgtaattggtcaaagaggacaccgaccatttttcttcgcccatgcggaaacggagcatagcatcccggataaacgggaaaatgtaggtagcatactctgcacccttggcaggatcatagtccatcagcttttggagcatttgctcccgacaggagagctttatatctataaaacggtctgtgtcatacaaatcgccgccatccacgccgagaaagaatttgatgcgcttgttgagctgcggttcgtagtggtgcaggaagaacgaaaaataaagcaaattcttttcctgcaaggcagacagaatatgttcatttggattgctaaccgctggcggttccggctccagttggaagatgcgctctgccacatagggaatgatgccatcaccgtatggattgacagcgtgtttcggtatgtatctggtcatattccatgtaaaatcattcagcatagcgcacctccttccagtttagtaatactcataaatatcccgtggtcaactaatgggttatttattactttattttctttaacatacggtgataaataggtgcatttggtgcaggagttgtgattgggatcagaagtccctctttgataaattgttccacacgcaaagcaatccacccatcaccgatccctaattgattctttccaagaacctgtccaacaagcacgctttccttaaactcgtcgtccagtgtatccaattctcgaagaataaatgtatcatacagagtttctgatacgctgaccagtttgccgtttataacagcacgaagaggagagttttcctgttggagttctctccagcggttagccaaactacgaaggtaatttgttggcaacttctttccaagagatgccatccgtcccaagtgataaggttcaacttctccccaaccgttatactggacaatgcatccatctggtcttgtttcccacattggaagctccacaatggtaacatccaatttttcaaagccgattggtcgtagttgttccagaagccaatacaatccgcacacatcatctggttctcgtccgacccaaacacgaatcggctctccgttttgtgctttttccagtagcgtagcatagttctttcgggatgtattgagaagttcagttacgatttcagatgccatatcgggcagtatgcttagtagcaaagataatgccgactcacgctccaaacaaattcctgcttcggagatgttgcccacagacaatgccaacggaagattaactatgtccttacgatttccctccaacggtatagcattctcccaaccagaacgctcccgttcttctgcttgatgctggaacttttctatttcttcttttgaaactgtcccatcagagataattacactggttgctccgcctaaaaaacccttatgtccaatcgcaaccgccatagtccctgcggcactgtcgctaaatactacttctaacataacgttgctcacctcttagctaaattcaaattctttttagtgcttctttcttcaaagccgcctgtcccatttctttttcataatcgcccttggcataagcgacattgctcaatgcctggagcatcttatcttttgccagccttttcatgacctccgcaagatcttcatccagagtaccacgctttatatagcggtttatggtgttcagacgcttctcatgtatctgcttcactggatgatcatccgcaagctcccgttgttctctgcctttcagattgccgatctgccgacaggtgcggtgcagcttatctcccggcgcataaccgccgcagtatttggtgtgccttgcgttggttgtcagaaaccatttgccgcagatccggcacttcttaggagcgtgaccgacacacaatccctcaaagagatctgaccggaacatccctacaaaggacacatagtgcatccgtttgacgagcttcgccacattttcgccgggacggatgacagatacatactgaacggagttgttcagggtagacatccaggcatttccctcagtaatagaaaagtccggagggaaatagcttccaaacatttttgcaaagccctctgcggtgcggtcagcttcgttgccgtctgatttttctgcaaaatcaagcattgccttttggtattccccaagggagtatgccagatgcccgaatacagcggtatagcgttggagcatcatcgcatcggcatatctcggaacttcttcaagctgcaaggagttggttgtggcttttatggcaaactccatatatttcagagcattgtccgcagtaaagactttttcaatctgttctctgtgttttggaatatccatgtaggagaacggcggtgttttactgagaatatcaagcatcgccagagcagcttcccttgccaaaggaaagagtgcagaagcgtcctctccggcgttcaacattccaagcagcagattgattttttcgcattgctcattcatctttgcaatggcatccgcaggaacattcagcgcatcacaggcaagagtgccgacagggaatgttttgccctcatatatgaccgtatcctgccagaaatccaatgtcatcaattcttgattcatgcttgccctcctgtcctggtttttcatttttctaattatatcatgtaaatgtgaagaaatctacgtcctcagataagttgtcctgttttttgaaacaggattgtcctgtcattagcctgttttttgaaaaatccgtcataaccatagtagaaagagcgaagcacctgccaaccacggcgggtgcttcgtgctttccagactattatgaacggagatttttctatgacaatttatgaaaccatcaaggcggcgatctgcgtgaagcaagccgccgaacactacgggctgaaagtgagccacaacggcatggcttgctgcccgttccacaacgacaggcatccgagcttgaagctgaatgaggactattttttctgcttcggctgcggagccaagggggacgtaatcgaccttgtggcaaggctgttcgatctgagcagttatgaagcagcgcaaaagctggctgcggactttggacttgacccaaaaccgcccactgccgcagctatggtcaagccgaagcgtccctatatccgtcagttacgggaggatgaaatgctgtgtttccgagtgctgacagactatctgcatctgctggaagattggaaagttcggtatgcacccaagacaccggaagatgctctggatgaccgttttgtggaagcctgccagatgcactgctatatcgaatatatggcagatgtgctgacggtgggtgatctggaagaacgggtggcattggtggacaagctgatgcaggacggcaagattgcttttctgcaagagtacaccgcacgaaagaagaaggaggtggcgcaccatggcgaagaacctgaaaacgcctgatatgaacttgcccatgtggtttgatgggcagaacatcaacgaagctctgttttgtgaagaatttctgcatgagcgcagaatcatctttgcaaacggagcttttttcacgcctgatggtcgggtgacagacgatctcccactgcgtggggagatttacgacaagctgaaattttgtgccgtgaacaacattccccggaagatcaccaacattctggaagtgctgaaactggaagcacaagtgcctgactttccaccggaacaggatagaattcatttgtccaacggtacgctacttttggacggcacatttactgagggcagacctgctattgtgcggagccgtctgcctgttgcctacaatcccaacgcgcccgcacctgaaatctggcagaactttctggatgggctgctccatgcggaggacatccccaccttgcaggagtttatcggctattgcctgatcccctccaacaagggacagcgcatgatggtgattaaaggcaatggcggcgagggcaaatctcaaatcggtgcggtgctatcctctatattcggcacaaatatgaaagacggcagtatcggcaaaatttctgaaaaccgctttgcccgtgccgatctggaacacattctgctgtgcgtggatgatgatatgcgaatggaagccctgcgccagaccaactatgtaaaatccatcgtgacggcacagggcaagatggatttggaacgtaaaggcaagcagagttatcagggctggatgtttgcccggctacttgcgttcagcaacggcgatctgcaagcactgtatgaccgcagcgacggattttaccgcagacagcttgtgctgaccaccaaggaaaagcctgcggacagagctgacgatcccgaccttgcagagaagatgaaggccgaagcggagggcatcttcctctgggcatttgaaggattgcagcggcttgttgccaacaactttaagtttacggagagtgaccgtatccgtgaaaaccgtgaagcggtcaagcgtgacaacaacaatatctttgatttcatggaatcggagggatacatccggcgtaaagcggatgcgtccattagctccaaggatttctatgaaatctaccggatgtggtgcgaggaaaattcccttgctccgctgaaagcccgcagcttcagcgacgccatgattgccaatgccgggagattcaatctggagcattgcaacaacatcaccaactctgccggacggcgggtttggggattcatgggagtggaagccattgtacgacctcatataaatgggttttacggagattcgccgtgtacgtacgtaccggaggaatggcggcaggtcgagtaaatcccattactggtacgtatgtacgcagcaaaagagcgtaaaacgctcgttatagaaacagcacgcatcctctcgttcgggttgtttctatgtccacaggtttttgaaaaagtgtctgtggacaccggctgcaagaggaagttgacacagaacggctccatgcagacgggctgaccatgggaaaaggcgcagacattttcgctttggtcagcagaggtcgccgcagtgaccgcatcccctctcgggagagcccacggcactttgcagccagtatggatgaaagtgtaatagtgggttattacactttgaaaaagtgccgttctccagctctccgctgtctgcaaatttcaaagaaaggaaaaatccaatggcaagaaatgatggaatccaccgcaccgtagcccggaatcaggacttggaaacaccggctgatgtggcaaaggtacaggaacacaatgagcgtgaaaaggacagctacagcaatcaggacatcgtaccggaacgcacttctctgaacattcatttcaaagcacccgcggacgattatgtaaaaatgtttgagcagatggaacaggacggtgtaatctccacaagaggtctgaaaccggatgccgtcaaatacggtgagttgatctttgatgtgaactctgcttacttctacaatcacggcggctatgaatttgcaaaacagttttatgccgatgcctataaagccgccgtggagatcgtaggcggtgagcagtatatcctatccgctgtgatgcacgccgacgagcgcaaccgggcaatgtccgaagctctgggcgaagatgtgtaccactaccaccttcatgtggtttatatcccggtggtagagaagcaaattctgtggtcgaagcgatgtaaggatgaatccctccggggaacggtaaaggaaacgattacacaggtcagccgcagtaagaaatgggagtccaagcccgttttggatgctgagggaaatccaatgttaaacgcaaaagggaaaaagattttgaagtcgtcctacagtgtgttgcaggatgacttttttcatttcatgcgagctgccgggtataccgatgtggagcgtggagaacgtggcagcaccgaggaacatctgacggtgacacagttcaaggtacaggctgaacagcagcggttggaagcagtcaccgcacaggttgccgatgcggaacagtccttggagaataccagagttgctgctgaaaaacaaaaaaagaaactggaagctctgcaaaaggaaacaaaggcagcaagggcaactgccctgacggtgcaggacattgaagcaatgggaaagaaagccactttcggcaacaatatcactctgacaccggatgagtgccgcatcctaaaggattatgcagtcagcagcttcgcagagaaagcggaaaagttgaaatacaagcaaaaatacgaacaggcagaaaagagtgcatccgtttggaagcgccgctttgaagccctaaacgaaaaatatttggaactcaaaaagaaagcccagccctatctggatgcactggaaatcgcatccgaaagggttcgggcttttcttgatgccgtcctcgccagaggaaaggaaacacaggaacataagcaccctgcccgtaagcgtaggcaggatatggaaatttagaaaggaactatttgcctatgaataaaaccgtagaggaaattaacaagatgattatggaagatgccccaatggaagaaatcaacgatgccatcggctatattgatatttgctcctgctttgacccgattttcgagccgcccattgattttctggaagaatgccgcagacatttggaagcggcacagtcttctttctgtgagaccattgagcgcaagatcgggaacacatggtatgtgattgaaacagaatgtgccgggaatgagccgcttgccgacaaggtaaaacggctctttttttctgacaagggggtgatttgttaatgactgcgacacaaaagcatgatataattccagtatgcacaacggtactgtcggctgaccaacaaccgaaggaggatattatgttggatcagcagaaaattaccattctctactgccgtttgagcaatgaggatgctcaggatggcgagagtaacagtatcgcaaatcagcgagagtatttaacccgatatgcccgtgaccacgggtatacaaacctgaaaattctggtggatgacggttataccgggacgaacttcaatcgtcccggtgtgcaggaaggatttgaacttgtcaagcaggggcttgtgggctgctggctggtcaaagacctcagccgatttggtcgtgactatctgactgttggacaatatacggatattatctttccgagctacgatgtccgctttatcgccgtaaatgacggtgtggacagtaaccggggagacagcgagggcttcgccgcaatccgtaatctgttcaacgagtggtatccccgtgataccagcaagaaagtccgtgtcagtttgcggcagagaggaaccagtgggaagcacatgggcaaaccgccctacggataccgctgtgacccggaggacaaggatcactggattctggatgaagaagcggctccggtagtcaagctcatcttcgacctttgcattgacggcaaaggcccggagcagattgcaaggattctggaagaaaagcagattctgaccgcaaaagctctgtatgccaagcgaaagaaaaagccgatgccggaaagaccgtaccactggggcaaccagtccattgtagggattttggaacggcaggagtacacaggctgtacctgcaacttcaagacttattccaagtcctacaagctgaaaaagcggattcctaatgagccggagaatatgttttatctgccggacacacaggaagcgattgtatctcaggcacagtttgacagggtgcaggaactgaggaaaaacaaacgccgccccgcaaaagcggaacggcagggattgttctccgggcttctgttttgtgccgattgcggcggcaagctccactttgccacaagcaaaagctttgagggcaagcaggatcactacgtctgcaacaactacaagagcaaccgtggtacttgtactgcccactatatccgggaagatgtgcttcgtgaaatcgttttggaacgcatccgggcggtcaacgaatatatccgcagtgatgtagatgcctttcaggaggaatggctgcaatgccgcaggactgaccaggaacgcagcatccgggaagacaaaaagaaattggaacaggcaaagaaacgcctttccgatttagatgtcatcatctcccgactgtatgaggactatgttcttgggaacctcagtcaggacaggtacaaaaagatgtctgcggactatgaagcagaacaggaacggttaaagctcgaaattgaggttatcgaagaatgggtggaacagcgggaagaaatgaacgacggtctggatgcctttattgccctgacacagaaatatgtggatgttgaggaactgacacagaccatcgtgaacgagtacatcaaaaagatcgtcgtttatgctccggataagtccggcggcaagcggacgcagaaagtgaagatttacttcaatttcgtggacgatgtggatattcccgttatttccgagcctatcatcacacaaacaacctatgaacgcagaaaaacggcgtgaccttcgggtcacaccgttctctgcgacaaaatagttccttgtcactattaagccttgcattatcacgcgttttcgtatagaataaggtgcgtacgtgtaaaagacgggctcgccctctcaggcgctaacgcgccagctcccccaaagggggagcccttggcaatccacgcagacttcatctctttgccaaggcctctccctttgggagaggtggatttgcgtagcaaagacggagagggcgagcccggcaaagtcccaccggacatactgaatgcaaaaatccacctcctgctccacagcaggtttatcaggagatctacaacttatgacaaatcgtgaagagatcgaacgccgcaggacgttcgccatcatcagccaccccgacgcaggtaagaccacccttaccgaaaagctgctgctgtacggtggagccatcaatcaggctggctccgtcaagggcaagcagagcgccaagcacgccgtgtccgactggatggacatcgaaaagcagcgtggtatctcggtcacctcttcggtgctgcagttcaactacgccggcaagtgcgtgaacattctggacacccccggccatcaggacttctcggaggatacctaccgcaccctgatggcggcagactctgccgtcatggtcatcgacgccgcaaagggcgttgaggcgcagaccatcaagctgttcaaggtttgcaccctgcgccatatccccatttttaccttcatcaacaagatggatcgcgaagcccgcgacccctttgaactgatggagaacatcgaagaaattctgggcatcaagacctaccccatgaactggcccatcggctgcggcaaggagttcaagggcgtgttcgaccgcaacgcacgcaaggtgctggctttctccagcgacggccgcgccaacggcgtgaagaaggtcagcgagaccgaggccgagctgggcgaccccgcactggacgagctgctgaccccctacctgcaccagcagctggtggacgagatcgagctgctggacggcgctgccgaggagtttgatctggacaaggtgctgcgcggcgaattgagccccgtgttcttcggctctgccctgaccaacttcggcgtggagcccttccttgaaaacttcctgcggctcacctccgctccgctggcacgcgtggacagcctgaccggcgagccggtggatccctgccgggacgagttctccgcctttatctttaagattcaggccaacatgaacaaggcccaccgcgaccgcattgcctttatgcgcatctgctccggcaagttcgagcgcggcatggaagcctaccatgtgcaggagggcaagaacatcaagcttgccaccggcacccagctgatggcgcaggaccgcgccatcgtggacgaggcctacgccggcgacatcatcggcctgtttgacccgggcatcttctccatcggcgacaccctgtgcaccggcaaaaagaaggtccagttcgcgggcatccccaccttctccccggagcactttgcccgcattgagcagaaggacaccatgaagcgcaagcagttcgtgaagggtatggagcagatcgcgcaggaaggcgccatccagatcttccgcgaggtcggcggcggcatggaagaagtggtggtcggcgtggtcggcgtattgcagctggaagtgctggagtaccgcctgaacaccgagtacaacgtggagatccgtatgcagcagctgccctttgagcagctgcgctgggtgcagaacgaccccgacacctacaacctgcgggatctggacctgaccagcgacaccaaggctgtggaggacatgaagggcaaccgtctgctgctgttcacctccgactgggcggtgcgctgggcagagactcacaacgagagcttgcagctgagcgagttcggcaacatctgataaaagagcgctgcggagtgcacctgcgctccgcagttcttttttatagaataaaaaacacaacaaagtatgccagacattggaatgagggttcccattgcggggaacactgctggcatggagggtaaagtatatgcagaacatcaacattggcaaaagcggcatttccgtgccgtttctgggcatgggtacatgggccatcggcggcggtgcatggtggggcgataacgacgatgcactgtcggtaaaggccatccagaccgccgtggagcagggcatccagtggatcgacactgcacccatctacgggctgtaccacagcgaggaagtggtgggcgaagccatgaagcacatcgaccgcgacaaagtggtgctttccaccaagtgcggcttggagtggcggcacgagtcccccatcctgcacaaggtggtggacggcgtgcaggtgtaccgcgacctctccgccaagggcatcatcgaggacgtggaggacagcctgcgccgtctgcacaccgaccatctggacgtgctgtacacccactggcagagcccggacttcggcgtatatccgctggaagagaccatggaagccatgatgaagctgaaggagcagggcaagatccgcgccatcggtgcttccaacgtcacctccgacatcatccggggctactgcaagtacggccagctggacgtcattcaggaaaagtacagcctgctgacccgccgcattgaaaagcagctgctgcccacctgcaaggagctgggcgtctcggtacaggcgtactccccgctggagcagggtcttttgaccggcaaggtgaccatggacaccacctacccggagggcagcacccgcaacacgaacccctgcttccagcccacccgccgggcacaggcgctggaactgctggcaaagtggagcgacctgaccgagaagtacaactgcaccatggcacagctggtcatcgccatgaccgcccgcatgatcccggggctgcacgttctgtgcggtgcccgcaagccggagcaggtgctggataacgccggtgcgctgcacatcaagctggacggtgccgatgccgtccgcatgaagtgggacgtggacgcgatctcctgaggataaacagaacaacaccggagcatcttcggacgctccggtgttgttttattatttctgctgttccagcatggtctggatgcgggtcttggcgcggtaataggtcacccgcgcccatgcggcattgtgaccaaagatcgccccgatgcggtcaaagggcagttcgccaaatacccgcaggctgaaaacctccttgtagggttcttccagcgcgtgcagacactggtgcaccgtaaaggcggcatccttgtccaccaaaagctgcgcgatatccgggctgtcggcggcttttgtttcggcatcctccagcggggcggcgtgctttgcgcggcggcagtggtcatagtaggcgttgcgcgccaccgtaaacagccacgcccgcacatcctgcttgccgtcatagtcctcaaggccgtccagcgcccggaaaaaggtctcctgcgtcagctcctccgccagcgcttcgctgcgggtaagcccctgcaaaaacaggcagacgtcccggaagtagagccggtagatggtttcaatgtccataggcatcactccggccattcgacctcatcccatgccacaggctcgctgcccactgcataccatgtaccgtcctgaccgttgaacgccaccgtcatatccgctgcatccaccaccgccgagcggtcagtgcgcatccatccggtgctgcggagcaggtctgtgtccttttgcagcagcttgtcaagggcatcgtgcacccacggaatgcggtagcggatgacctcgtagtgctcgtcggcatgggtcggcttcaggtatacgtcctcggcgcgggtctccagcacccagccgttggcaccgttttctgtctgccggtagtaagcctgcaatcgtgcatcaaaaaaggatacccggtcgcaggcggtgtagccgtaccagccaaagccgcacaccgccgccagcgccagcgctgccgcaaagctgcacagcatggtgcgcagacggcggcggttcaggctgctgcggatgtttttcagcggtgcatccggctggggttccggctgcacaggcaccggcttttccatccgttccagctctgcacggcaggcgggacactctgcaaggtgctgctccaccagcgcactgctggcggggctggcaagcttttcggcgtacaggggcagtagatcgcggatcacgtcacattccagcttcatggtcatttcctcctttgcgggctttcgtgcgctctttcaccccaataacgcacaaagaggaaaaacgttacaggttttttcaaaaaactcccccagccacgcagaagcgaagactgagggagtttgttcagttttccttccagaacaagccgccggaggtctggaacagcaggcgcgggttcacgctcctgctgcccagcttgaagtccatggtcagctcctcgcccagtgcgcccacagcctgccccttttccacggtctgtcccctgctgaccgaaatctcctgcaagccgtacaggtagctgcgcagcccgcagccgtggtcgatgaccaccgtattgccggtaagcgcaagatcgcccgcaaacaccaccgtgccgttggccgcggcgcggcagggcgcgcccgggatggtgtacagctttgtggagttggagcggctgccctgctggccgtccgttactttgatctgcccgtagtccaccagggtcatggagtcctcagccgggggcacaaagccgccctgccactgcttggcggtggcggcagcttcgtacagcggccagatggcgctgcggaactgggcgttggcgctctccgcagccggttcttcggcttccacctccaccgtgccgaagtccttcggcagcacggtcagggtgcgggtgatggtctcgccgttcaccgtgatgttcacctcatgcccaccggaggaggcgttatacgctgccgggatataggcgcgccagccctcggcggcgcgcacgcactgcacgctgccaaggtcagtctcgatggtgggcacggcgtccccggtcatgccggagatgcgcacgcccaccgtgccgccctgctccacccgctcagcggaaagctccacttccgcgctggcctgcaaggtgaatcggaagctgtaccggtaccagccggtgggctttgcggggcgctctaaccccaggtttttgcgcagctgcccggtgctgccgccctcgaactgggtaacgaccccgcccttgggcacgcgccacgcggtcagttccgccttatactcgccgtttgcagggaagaggaagctctggtactcccctgcgctgcccgcaaacagcacatcccccgccgcattctggatggtcagggcggtgtagcccgtccagtccggcaaagcaagctccgggtgggcagtgtacagcacccccagcttctgcacggtcagggtggcggggctggcaaagaccttatccagctgcccgcccagcagcggcacctgccagcaggagccgttcggctccagcgcctgcccgccgaactgcgccgccccgtccgggcagccgccctcggtggtaaaggcatagcttacccccatcacagccgccagcagcaccaccacacccagcgccacactgatgatccagagcaaaaaacgcttcatgttccttctccttatgtacaaaaagggcgcaccgggacaagtccgttcagacagactgctccgtgcgccccgatgcgcttatcttcccggcagtttccggtattcaaggatcattctgcctcggtctcgtcctcagcagcagcttcctccggctctacggtttctgcatcatcctcgccgaacagcagacgctcgtattcgtccagctccttctcgcggcggttcaggtaaagagccacagcagccagcgcaccagccacagcagccagaacagcgatcacagcgaccaagcaagattttttcatagattcagtacactcctttttgcagttgaaacattgtttcagcttgatttttccagcgggcgacccgcaaaaggatcttgattcaagcggcgatcagcgccgccttgtagcttttattatacccgttcgcgtccaaaattacaaccgttgcgccccaattttcacgccccgaaggtgctgcggggcgcagtttgggcagtgtgccggttttggcgcggttcattacagcaaattgccaaagtcacagcagcagcggcttatatgcccggaacgccccgggcagggcgtaggtggtgcgcagctgctcccggcttgcccagacatagcccgccggggcactttgcgccgcaacgcgcagctgcacgccggacatgagccactcgatgtgggtaaagatgtgctttgcggcgggcagggcggcgggagctgccgtgccggtgtccagccccagtgccgtaagccgcgccagcacctcggcctgcaaaagatgctcgtcctcccacagcaccggctgccacagcccggccagcagccctttttgcggtcgctgctgtaccagaaagcccgccgggctttccaccagtgccagcgttaccggcacaatcttgcggggcttcggctttgccttttggggcagctgggcggtagtgcccgccgcccgggcgcggcagacttccgccagcgggcactgcccgcacaggggcgcgccgttgggcacgcagaccagcgcacccaactccatcagcgcctgattgtaatcccccgccttttccggcggctgatgctccatgacccgggcggtaaaggccttttttaccgctggttctgtaataacacccgggtcattatacagacgggaaaacacccgcagcacattgccgtccacggcgggcacgggaagtccgaagctgatggacgcgatggctccggcggtgtactccccgatgccgggcaaagcaagcagggcggcgtagtcggcgggcagctgcccgccgtactgcgcacagacgagctttgcggccttttgcaggttgcgcacccggctgtaatagcccagcccctcccacagcttatgcagcttttcttccccgcaggcggcaagcgcggggatatccggcagcgcttccaaaaagcggtagtaatacggcagcaccgccgacacccgggtctgctgcagcatcacctcactgagccacacatggtagggggtggggtcctcccggaagggcaggctgcggcggttcttgtaaaaccactccaagagggcaggcgaaatgttttccacttgttttgtgctccttgttgaaaaataaagaactaagaaagccgccgcaaaggcggcggctttcttgattacagtatgcgtgcttctcagaagccgtatgcggtgcgggggaagggcagcacgtcacggatgttctggatgccggtgaggtacatgatcatgcgctcaaagcccaagccgtagcctgcgtgctccacgccgccgaacttgcgcagattcaaataccactcgtagttggtcttatccatgcccagctcgtccatgcgtgccaccagcttgccgtagtcctcttcacgctggctgccgccgatcagctcgccgatgccgggcaccagcatatctgctgctgccacagtcttaccgtcggcattctgcttcatgtagaagctcttgatctccttggggtagtcggtgacaaagaccggctttttgtacaccacctcggtcaggtagcgctcgtgctcggtctggatatccacgccccactccacggggtactggaacttcttgttgttcttttccaagatctcaatggcttcggtgtagctgatgcggccgaactcgctgtttgccaccagctccagacgctcgacaagacccttgtcgatgaactggttaaagaaggccatctcgtccgggcagttgtccagcacatagcggatgacgtacttgatcatagcttcggcgttgtccatatagccgttcaggtcgcagaaggccatctccggctcgatcatccagaactcggcagcgtggcgggtggtaaagctcttctcggcgcggaaagtggggccaaaggtgtacaccttgccaaaggccatggccatggcctcggcctccagctggccggaaacggtcaggttgaccggcttttcaaagaagtccttgctgtaatccacagcgccatcctcggtcttgggcacattgtccagatccagtgtagtcacgcggaacatctcgcctgcaccctcgcagtcggaggcggtgatcagcggagagtgggcatagacaaagccgttctcctgaaagaacttgtggatggcataagccgccacgctgcgcacgcggaaagcggcgttgaaggtgttggtgcggggacgcagggtgggcatggtgcgcagatactccatgctcatcttctttttctgcagggggtactcgtcggcggggcagtcgcccaagatctccacgctctcggcgttcagctcaaagggctgctttgcctgcggggtgagcaccagcttgcccttgatgcgcaggctgctgtacagaccggtgtggatgacttcatcatagtttgccagcttgccggcttccagcaccacctgcagggtcttgaagcagccgccgtccgacagggcgatgaagccgatgttcttggagtcgcggatgttctttgcccagccgcagacagtgatctcggtgccgtccgccggggtgttcttgaacagcgaaaggatctcggtacgttccataatagttctcctttacaaagaaaaaagacagcttttgccctgaaagttcagggcgaacaagctgtcttgtaatgtccgcggtgccacctgaattaccggaagtgcccggtcgctcacgcgctctttgtttaagcgctgtccctataacgctggacctgcggcgcacctacttagcggcagacgcgctgccgtgttcagtttgctgctcccgggtgttcgttcacgcggcgcacgggcgcggctctcagctgtgccgcactctctgggccggacggcccgcgctacttttcccgttccttgcatttgttgttttaagatagcacgttggcggcattttgtcaaccttaccgtgcggaatcgggtaaaaatctgcgttttttcttgtcagatcgccttttctctggtaaactggaaaaaagcggtattccgcaaaaacagattctggaggaaatcatgaaacacatacaccatatcatccgtctgctgacccttgccgtggtcagctgcgcactggcagccctgctgagcggctgcaccaaggaggaattcattgccggttacaacgaattcatgttcggcgactggcttcccgcctacggaagcacctcccagtcggctgcaccgggcagcagcactgccagtgaccccgaccacgtctatgccgagcctaaccccgagtgcgatgccaagatcgcatcgctgatgagccagctgtactcgctggagtcctcggcacggtcggatgtcagcagtgccatccagagcgcaaaggatgaataccacgccctgccggcttctcagcgcaccctcggcaacaaggtcagcatcgcctacagccatctttcctctgtggagagcacctacgacagcgccgtctcctcggtggtcagcgagatgcgcagcgtgctgcggcagtataaccagcccgagactgtggccgatcaggcatggagctactatcagtctgccaagagcagcatgatctccagccttggcggctgattcagcttaataatgcatccgcgaggccctgtgctgccagatatccggcgtacagggcctcatttaggttgttgccgtgcccgccgatctcgatcagcagactgccggtggtcaggtcctgattatagaaccggtagctgaacagcaccgggcgggtaaagccggggtattttgcttccatgctgcgctcccacgcagcggcaaagcgcaggttctgccgccatgcgggcagctgcacgctggtgccgttgtcgcacccgcagatgatcatcacctgcgccgcctgccgtccgtctatggtgcataccggggcgcagcgggtaccgttttcccgctcgatggcgtcgcggtggacgtccagcaccaccttgatgctggggtactgcgccagatactgctgcaccaccgcccggctgttggcgtagctgccggtgtagctggggtagtcgttcagggtctcgtcgtgcagggtgcagatgcccgccgcgttgagggtatcggccatcacccgccccaccgcgcacatattgatgctgcggtcggtgctgcgggccccgtccccgggggtgaaccacagcccggcagaaaggcggtagtcctcggtggcgtgggtgtgcatgatgagcacctgcggcgcggcgctgtccttttcgatggcaaagggcaggggctgcgccgcctcggcggcaatgtctgccgccgattgccgggtgttattcttgatgctgcccgcaccgcagggaatgtacttttcgccgctgccctgcccaaactgctgctctgtcaccgtgccggcatcggcagggcgggcttcgtccggctgcagcgccacaaaatactgctccaccccggtctgcaccgggacgtcagcttcctgcgccggagagggcgcggacacgtcctccggcacgctttccgcagatgccgcagcgcggctttccacggcctgctgtcccagatgcagcaaagtctgcgcggcaggcaccggcgccgccagaaaggccgccagcaccagcgcggcgctgcgggcaaagatgcacagcgctgcaaacagcaccgcagcctgcaaaaagggcactgccctgctctgccccgcaggcagacgccaaggctctctgctgcgcatggcaagacctcctttcttcaccccgtcagccagcagagctgctgcacggtaaggcggggctgcaaggcgcggttgacgctgcccgccagcagagccgcgccgtgggcgatgacgctgtccagcgcgcggggcgtgaccacaaggtctgcgccctcctgcgcctgcatcagggtggggatgcccgccgccaccaccggcacgccaagggtgtcccgggtcaggtggcgggtgtggtcggcctgcgccgggtagagccccgtgtccgaaaactgcaccgtgcgccccagccgctgcccctcggcggagcagagactgtccacgcagaccaccgccgccgggtgcagctggccaaccagcgccgccgccagctgctgaagcgaaagcccggtggccgccgccaccccgggcgcaacggctgctaccgggcgcaagccccgcaccggcggggcagcgcccgcgcccatggtgacaaggatgcgctgcaccgtgcgcgggccaagggcatcggcggtgatgcggcggttgcccactcccagcaccagtaccggcccttccggcggcaaaagggcgcgcagctcccgggcgcacacctcgatgacggcggcgtcccgctcgtccagcacgctgacgctgggcatttccagcgtcacatacctgccccggggacggctgagcccctcgcgggcaatctccacccgggtcactgtcaccccgccgtggcgggcggtagccagccgcacccctgcgggcagcggctgcgccgcgccgctgaacagctcgtcagccatatccgtagtacgcattttccacactctccgttccttttttggggcaaaagcccgccttattgccggaaagtatgggaaaaacaaaacttttccaaacaaaaatcaaaaaaacgcttgcgctggtacgcgaaatatggtatcatagggtgcgctgttataggtagccaaggaggtggaacgaatgcctaacatcaaatctcagaaggaccgcgtcgtgcaggctgctgcagagcaggctcacaacaaggccattaagaccaacctgaaaacagtcgtcaagaaggcagacgctgccatcgatgcgaatgccgctgacaaggacgcaaccgtcctggctgctgtttccgcgatcgacaaggctcgcgctaagggtgtcatcaagaagaacaccgccagccgcaagatcagccgtatggcaaagcgtgctaacaagaacgcttgatcgcgcagtttgattgacgaacaaaacctctgtaccgggtacccggcacaggggtttttgttttttccgctgttatgtcccgcacagcgcggcaaggctctgccgctgcaccggctccagcagctgctccggcggcaggggctgcggcggcaccgccatccaccacgccgcccacgcggcgggcacaagcactgccagcgaaagccccgggtacaacagcgccggctcgtgcagccacgggctgcccggcggcagcaccagcgctgtgcacaggcacagcgccgcccacagctcccataatacggtctgaccgctgtgtttcatccgcttcacctccgttttgcccccagtttaccagccgccgggtgcaaaatatggcgaagcagcgcggacaaaacagcttagttctggtcatggctcttgcccgcaaggctgcacaccacaccgcagacaaggcttgcggtgatgcccgcagaagcagcagtcagcccgccggtcaggatgccgatggcacccttttccgccacggcggtgcgcaccccctttgccagcagatgcccgaagcccagcaggggcacgctcgcccccgcaccggcaaactctgccagcggcgcatacagccccactgccgagagcaccacccccgccaccacatagccggtcaggatgcgggccggggtcagctttgtcaggtcgatgaacaactgccccaccgcgcagatggcgccgcctattaaaaatgcccacagatagttcatttcagttctccttttccggcgcggtcagctctaccaaatgcgccaccgccgggatgctctccttctgcaaaaaggtggtctggctcatcagcgccccggtggcgataaacagcacccggcggctgccgcggcgcagcagctttggcaggatatgcgcgcagagtacggcggcgcagcagcccgcgcccgaaccgccgctttttacccgctgctccccggcatcgtagagcagacagccgcagtccgcgtggtttttcagcagcagaccctctgccgccaacagctcccgcagcatctgactgcccaccagcccaaggtcgccggtgtagatgcagtcgaaatcccgcagctccgcatgggtgtcggcaagatactgcagcagcgtagcggcggctgccggtgccatggctgcgcccatgttgttgatatccttaatgttatagtcctgcacccgcccaaaggtggcggcggcaatgcccaccccctgccctgccggacgcagcaggcagcacccggcggcggtagccgtccactgggcggtaggggtgcgcaccgcgccgtaactcagtggggtgcggaactgacgctctgccgcgcagaaatggctggaagtcatcgtcagcaggttctgcgccgccccgctgctgcacagcgccgcgcccagcgccagcgcctcggccatggtgctgcacgccccgaacagccccgcaaagggcacgcccagctcccgcagcgcgtagccggaggcggtgcactgcgcctgcagatctcccgccagcgcaaggtccacctgctctgcgggcaagccagccttttgcaggcagagccgcgccgcccgcagctgcaactgcttttcggcggcttcccagctgcactgtcccagccggttgtcggtggtcagttcgtcaaagcccgccgccagcgggccatcgctctcttttttgccgccaaccgccgcctgtgcggcgatgaccggcggggtatggaacaacagggtatcgccccggcgctctgtcataaaaaatttctccttttctgcaaaaaaagccccggaacgtgctatactggtgctgtggcactgcaatatccggcggggctgttccgtattataaggcagaagcccccagcagccacagcaccacaccgtacaccaccgccgccagcgtgccgtacacgatgaccggcccggcgatgaggaacatcttggctcccgtgcccggtacacggccctcggccttgaactcgatggccgcactgaccaccgcgttggcaaagccggtgatgggcaccagcgaccccgccccggcctttgccgccagcttctggtaccagcccagcgtggtcagcaccgccgagagcaagatcagggtgcagctggtcagggtgcccgccgtttcggcgtccgcgccctgccgcagaaacagctgccgcagcccttcgcccagcaggcagataccgccgcccacgcagaacgcccaaaggcagtctgccaaaagcggcgagtgcggcccggccttctgcacccggcgtgcgtattcctgcgctgtcatcttcatcttcccgcgcccccttttgcggatagtctgcccggggcggcgggtgcttatccttttttgtgaaagaaggtaggttctatgcgttcttcccaccaccataaacatcctgcccggcgtctgctctgcctgacggcgctgctctgctttgcggcgggcggcaccgcctacgcctgcacccgcaaggccgccgtgccgcagctgcccgagctgtctgccgagagccttgagcagcccgccgagaacggtgcgcaggaaaacccccttaccgccgcacaggcgcaggccattttggatgacccccgcatgatccttgtcagccgcgcccacaagatgccggaggactaccccgtcgagaccaaggaatgcggctcggctaccgccatcaacaagactttgcagaccgaagccgccaatgcctttctctccatgcaggccgctgccgccaaggacggcgtggatgtgcggatgcagagcggctaccgcagcgtcagctaccagaaaaagctgtacgacaacaagacccagtactaccgcgacaagggtctgagcgaagccgctgcccgggaaaaggcggctgtcatcgtcaatccgccgggctgctccgagcacaactgcggccttgccgccgacctgaacagcccggagcacaccacccttgacaccggctttgccgacaccgccgctttccgctggctgtgcgagaacgcggaacagtacggctttatcctgcgctaccccaaggaagccgaaagcgtgaccggcatcacttacgagccgtggcactggcgctatgtgggcgcggaaaacgccgccctgctcaaccagagcggcctgtgtctggaggacgcggtagccgttttgcagcgcattgccgccggggagaccgtgaccggttaaaatccgatgaaaactgccggaaaaccctgtggggtgcgttgcaatttacctgccgttatggtaagataaatacagtctgcccgtgtgcgcggtgcagccccgcaccccgacaaacgaattcaacaaaagaaggaatattttatgataaaccgcacaaaactctctgtgatcgccgtcagcgccgtgctggctgttgccctgaccggctgcggcggcagcgcttcttccgcgccgtcctccgtgtccagcgcctctgcctctgcaccggcttccagcactgccgccccggcggcggataccaccgaaaacggcaccgccgatctggacagcgccgtggaaagcctgctggctgctgaccccatctccaaccagttcgagatcgccgccatgaacattgagtacgacttcggcctgaaggcggaggacgtagccgcctacaagggcgtgaagagcaatgacaacggcgatgccggccttgtgctggtggtggaagctgcttccggcaaggcacaggacgtggtgaccgcgctggagagctacaagcaggatcaggtggctttctacggcaactacgccgagtttgcacaggcacagagcaacgtggaaaacgccatcatctcctccaagggcgaccgtgtggtcatggtgatcgcctccaacgagtgctccgcagacctgaacagcgctgtggacagcgccctgaacagctgaatctgaccttctgagccggtgccatctgcggcatcggcttttttcagtcaagccctcccgcacccgggatggaaaaaccgttattgcctgcaaaacttgtaaaaaaggaggctgcccccttggttttcagcaccatcatcttcctgttccgttttctgcccatcacgctggcgctgtactatcttgcccctgcaaaactgaaaaacaccgtgctgtttttatgcagtctggtgttctactgctggggcgaggtgcgctttttcccggtcatggtggcgcttatcctcatcaactatctcagcggccttgccatcgagcactttgatgcaaagcccgcgctgcgccgcttctttctgctggtggcgcttgtcggcagcttggggatgctgttctacttcaagtacgcaaactttgtgctgcgcagcgtgaatgccctgctgggcaccgcctttgccgaaattcaaggcatcggcactttgccgctgggcatcagcttttacaccttccagaccctttcctactccatcgacgtctaccgccgggatgtaaaagccgagcgcaacatcattgatttcggcgcttatgtggtcatgttcccgcagctcatcgcggggcctatcgtcaagtaccgggacgtctccgaccagctgcacgtctacaagcaccgctataacctcaagcagattgaagagggcatgaccctgttcaccttcggtcttgccaaaaaggtgctgctggcggacgccgtgggcgcgctgtggacagacatcatcggggtggctgacagcccctccactacctttgtgggtctggcaaacgcttccaccccgctggtgtggctgggcatcatcgcctacagtttgcagctgtacttcgatttctccggctactccctcatgggcatcggcatgggcaagatgctgggcttcgacttccccgcaaacttcaactacccctatatctccgcttccatcaccgagttctggcggcgctggcacatgaccctgtccggctggttccgcgagtatgtgtatatcccgttgggcggcaatcgcaaggggctcaagcggcagatcttgaacctgttcatcgtggagctgctcaccggcatctggcacggcgcgaactggaactttatctgctggggtctttactactttgtgctgctggcggctgaaaagctgttcctgctgccttacctgaaaaaaggcagggtgtggccgcatttctacaccctgttcctcgtggtggtaggctgggcgatgtttgtgggcaacgacaccggcgtatccttcgggctgctgttccaaaagctctttgtcccctccggcggggtgtcgccgctgtatttcctgcggaactacggcgtgctgctggcggtaagcgtggtgtgctgcaccccgctgatcgaaaagctgtgggatgtgctgcgcaagaacgtagtcacccgctgcgccgccatcctgacgctgctggtggtctccaccgcctatgtggtgggcagcaccaacagcccgttcctgtactttaacttttaaggaggcgggaagatgtccaaacacgaaaaaaagacctcctcccttttgcactacccggtgctggtggtgttcagcctgttcttcatcgggctgttcgcgctggatatggtcaccccggaccgcagttacagcgagctggaaaacaccaccctgagccagcgcccggcgctgacccagttcaccgccaaggggctgaacagctactttaccgcctacaccaaatacgtcaaggatcaggtggcggggcgcgaccagtggatcagcctgcaaagcgtggtagagaccactctgctgcaaaagcagcagaacggcggcatcctgctgggcaaagagcacatgatgttcccccgcacctacgggctgctttccagcgaggagcgcaccctgcccaagaacaccgccgcgctcaccagcctgtgccagcgctacccgggcaaggtgaatgtactggtggcacccgccgccagcgatatctataaagagaatgtgcctgcaaacgcccccctgctggacgaggacggctatcttgaccagctttccgctgcggtgcaggctgcaggcggcagctttgtggacgtgcgccagacccttgccgcccacaagagcgagtatatctactaccgcaccgaccaccactggacgagccttggcgcctactacgcttacagccagctgtgcgacgcccttggccttgccccttttgacaccgccgcccacaccgccctgactgccgacggcttttacggcactcactacgccaaggcgcgcacatggaacgctgtgccggacgtgatcacctactacgaccttgccaacaccctgacggtatggaacgtgacggcggcgggtcagcccgccgaggggcagaccaccggcctgtatgatacggagaagctttccgtctacgacaagtacgccatgttcctgcacggcaacaacggcctgagccgggtgcagggcaacggcagcgggcgcatccttgtcatcaaggacagctacgccaactgctttgtgccctacctgaccgccaactacgctgacattgacgtggtggatttccgcaactacaactacggcttggatcagctgatcgccgataacggctacgaccagatccttgtgctgtacaattttgacagcttcaagagcgacccctacctctaccgcgccggcgtaaaaggctaaactgccaaatgccgaaattattgcagtctattttcacaaatttgcagccgcaatttcatgcgtcccgccagtttttgaacagatgtgccaaaaccccttgataaaatccgactgctgttgtagaatgaccatatagagaacaatgctctatcggcacttggatatagacgccgtgggaacgggatgcaatgcggcatttccctttgataaaggagtattgaagatgaaaaagatgacttatcccgcagattatgcggtactttccaacgaagaaatgacctataccacaggcggcggcgctgttgacaatgctgcaggttttgcttccaccgctgcaacggtcgtaggcgctgtagtgctggcttccagctatgtctggggcattgggcaggcacgcacctggctgcagcaggaaggcaaccgagacggcaacttctttaccgttctgggccgcgccaccgatgccattgccgccgatatgagcaaatctgccagcaactttgtacgggacgccgtttccgccaccacggtagtggcactggctcccctgagcgccatcctgctgatcgtgcgctgaaccttttaatcagataaaacggtgcgtttgggtgcaccgttttggatagctttgtttcaaaaggagtgttattatggaaaaaatgatgatgcccgcgtactacaatgtactgtccactgaggaaatgacctacaccgaaggcggcgctactgccaccatgaccgaggctctgctgtgctggctgattcctccgtacggctggttcagaggcgtgaccgctgtccgcgactaccgccgtaagaaccccaacacctggaccgagaagggtctggatgctctggctgccgacatgaacaagggcactgccaatgccatccgtgacatcgcttgcaccgcttacatgatcagcaccagcgctaccggtgtcggcctgatcatcaacgcagcgatcgtcctgctctgatccatcttatctcataagaccggctcggagtacaccaaagaacaaagcaagcggaggcgctgcccgaaagggcagcgtctccgctgtttttatgctcattcctccggcaaagaatcctcttccaaaggttcttcatttgctcttgcacggaaatgtgccctcatttcttcattggtcagacagcctttctcttccccggagcggcggccttttgcgatctcactcatcagacggatcgtcgcctgcgctttctcataatcgcgcagctccacaatggcatattttccgcggccgttcttggtcaaaaagaccggcgagccttcctccacatcccgcaatacctcgttataatttcgcaaatcagaaatcggtttaatgttcggcatactatccactcctttcagttttagtataacgcatcttgctgtaaaattcaacgtaaaatttgcagcaaaaaataaaaatcccctgaactgctgttcccggcagctcaggggatttcataccttatgcgttgaacatatccttcagctttttgaagaagcccttacgcttttcgtagttttcttctttcaaagtgccctcaaattttttcagggcatcgcgctgggtcttgttcagctttttggggatctccacctcgcacttgacgtacatatcaccgcggccacgaccgttcaggtactggatacccttgccgcgcaggcggaaggtggtgccgctctgggtgccctcgggcacggtgtactccaccttgccgtcaatggagggtacggtgacgctgtcgcccagcacagcctgactgtaagtgatgggcacggtgacccacacatcgtagccgtcgcgctggaacacctcgctggggcgcacactgaccatgacgatgacatcaccggcggggccgccgttggtaccggcatcgcccatgccgcgcagtgcaaagctctggtcgtcgtcgatgcccatggggatggacacctccagcgtctttttggtggctaccttgccgctgccgtggcagaccttgcaggggttctttaccagcttgcccttgccgccgcagcgggagcagggctgctgggtctgcatcacgccaaagggggtgcgctgctggcggatgacaaagccgcgtccgccgcagtccgggcaggtctcggggctgctgccggcggcgcagccggagccgtggcactcagtacactcctgctgacgggtgatggtaatgttcttcttgcagccgtgcacggcctcgtcaaagctcagggtgatgcgcacccggatgtcctgccctttgcggggggcgttggggttgtttgcctgacgggacgagccgccgaagccgccaaagccgccgccgaagatatcgccgaagatgtcgcccagatccacaccatcgccgccaaaaccgctgaagccgccggggccgccgccgttctgtgctgcgtaggtggggtcaaccccggcaaagccgtactggtcgtacagctggcgcttcttcgggtccgaaagcacctcgtttgcttcgttgatctccttgaactttgcctcggcgtccttatcgccggggttatagtccgggtggtacttcatggcaagcttgcggtatgcctttttgatctcggcatcgcttgcgcccttggatacccccagcacttcgtaataatcacgcttttcctgtgccatatccactcacctctccgggaacgccctccccgggtaacgccccggtcggttcctcactctataaaccagcaagagccgctccggcctaaaccggagcggcttttgctttattgcgcgtatgcccgccggtttggccggacacagcgctttgtttcagacttagacttccttgaagtcggcatccacaacgccgtcatcgttgggcttttcgttggctgcgcctgcgtcagcaccgggctgtgcaccggcggcctgctgtgcggcagcggctgcctgatacatcttctcgaacacctggctcagggcttcctgctttgccttgatgtcgtccacattgccggactggacagcggtcttcaggtcagcaagctttgcctcggcatcgttcttcacgtctgcgggcagcttgtcgccgttctctttcagcatcttctcggtctggaacaccatctggtcggcaccgttgcggatatcgacctcttcacgcttcttcttatcgtcggcagcaaactgctcagcttccttcacagccttgtcgatgtcctccttggacatattggtggaagcggtgatggtgatgttctgctccttgccggtacccagatccttagcgctgaccttcacgatgccgttggcatcgatatcgaaggtaacttcgatctgaggcacgccacggggagccggagcaatgccgtccagatggaacacacccagactcttgttgtcgcgggcaaactcacgctcgccctgcagcacgttgacctcaacagagggctggttgtcggctgcggtggagaacacctggctcttgtgggtggggatggtggtgttgcggtcgatgatcttggtgcacacgccgcccagagtctcaatgccaaggctcagcggggtgacatccagcagcagcagacccttcttctcgccgttcagaacgccgccctgaatagcagcaccgacagccacgcactcgtcggggttgatgcccttgaagggctcgcagttcagttccttcttcactgcatcgtagacagcggggatacgggtggaaccaccgaccatcagcaccttcttcaggtcggaagcgcgcagacctgcatcctgcagagccttgcgcacgggggtcatggtgcggtcgaccagatcagcggtcagctcgttgaactttgcgcgggtcagggtcatatccaagtgcttggggccggtagcatcggcggtgatgaagggcaggttgatctggctgctcattgcgctggacagctcgatcttagccttctcggcagcttccttcaaacgctgtgcagccatcttgtccttgcgcaggtcgatgccgttctcggtctggaaggcgtctgccatccagtcgatgatgcgctggtcgaagtcatcgccgcccagatgggtatcgccgttggtggccagaacctcggtaacaccgtcgcccatctcgatgatggacacatcgaaggtgccgccgcccagatcgtagaccatgatcttctggtcgtcttccttatccacgccgtaagccagagcagctgcggtgggctcgttgatgatacggcggacgttcaggccggcaatggtgcctgcgtccttggtggcctgacgctggctgtcgttgaagtaggcaggcacagtgatgacagcctcggtgacagtctcgcccagataagcctcggcatcagccttcagcttctgcaggatcatagcgctgacctgctggggagtgtactccttgccgttcagggtcaccttatggtcggtgcccatctgacgcttgatggaagaaacggtgttgtcggggttggtgatagcctgacgctttgcaacctgacctaccagacggtcgccggtcttggtgaagccgacaacggacggggtggtgcgggcgccctcagagttggcgatgacaacaggctcgccgccctccataacagccacgcagctgttggtagtaccaaggtcgataccaataatcttactcataatgaagtctcctctcgaaagaacaaatcttgtttatatgatgcttatgatgatgtcaagcggatgttattgcaaactcccttgcgggaggttcggcttatttattcggccaccacaacggttgcatggcggatgatcttgtcacccaacttgtaacccttctggaaaacggtgaccaccgtgccgctctcctgcccgtccggggcggggatctgctgcacagcattcataaagttggggtcaaagggcttgcccagcacctcgatctcctccacatggagggcttccagtgcctttgccgccttatccagcgtcatgaccacgccctttttgtaattctcatcggtggtgggggcgttggctgccatatccagcgtatccagaatggggatgatcttttccactgcatgggaaacaccgtcgccaaacttctggtcggcctcgcgggtggagcgcttgcggtagttgtcgtactcggcagccatgcgcagcagctgatccttggcctgtgcggcgttcttttccgctgcatccagcttagccttaacggcttccatctcccgggccttcttgttgaaccagccgccgtccttcttcttgtcctcttcggtggcagcttcggcagcagcctgttcgggcgctgcggcagcggtcttttcctcgggggcagtttccggctgctcggtctcgggcaccgtgttctttgcttcttcgctcattccagatcctccttatagatcacagtccgccgtggtacggcagcctgcggggtgtcttttcgtttgccgctcatgccctcgcccagctggtctgcaaactcgtgcagcaggggcatcagcttctggaagggcatccgggtggggccgatcagggcaatggagccccacagcccgccgcctaccagataccggtcgctcacgatgcacagcccggggatctgcggttccagatcctcgcccagcagcacgctttcgctgcggttttccgggggtgcgatcaggcttgcggcctgttcctcgtcgttcagcagggtaaggatatcacccacccggccgtccagctgcggccagtccagcaggtactgctcgccgcccagaaatacatggggctttacgctgtcctgcagaattgcggctgcggcgctgaccaccggcacaagctccggtgcgatctggctgcacagctcgctgagcatccgggtggaaagatccaccggtgccacaaaggtaaggttgcggttgagcagcgccgcaagggcggctgcattttcccgggaaagcccggtgcgtacccgcgccacccgggtgcggacgtaaccggcggtggtcacagccagcacagcggctgcgctgcggcccacctgcaccacctcgtaatgggcgatgcacagatcctcggcgcagggggtgctgacggcggcggtgcagccgctgatggcggccagcgccttggcagcgccctgtgccagcttttccggctcgtggtcaaggctggcgaacaccacatccacccgggcgcgggtaacgcggtccagcggctgatcatcggtcagcaggttgtccagataataccggtagcccttggcgctgggcacacgccccgcgctggtgtggggctgctccagcagacccagctttgtcagcgccgccatctcgttgcgcagcgttgcgctggacactgccatgtcaaagtagtttgccagcacgctgctgcccaccggctcgccctcaaggccatacagcgccacgatcgcctgcaagacccgttgcttgcgtgcatccatcgtcatagcgcctgcctcctttttgtatcgcttttgtttgtttagcactccttgttcctgagtgctaagaccattataatcgtttttgccctgctgtcaagccctttgcaaaaatgtttataaagattcataattctgtcataaaagggggggtgaactccctcagtcaaagcctgcggctttgacagctccctcggggagggagtctctggcgcgcccgcaagctttgcactttagccggaaactgtaccgctatgccaaaggccccatcccagagggggctggcatcgcgcagcgatgactgggggagtttgtttcccacgccccctcccgtgaaaaagtagttccgaaacgcccgcagacgtttcggaactaccaataaaaatattctttccgctttttatgcgcaaagcagcgcggtgcgcatttaaaatcgtcccgccttactcctccatctgctttgccagaaaggccgctgccaccgccactgccttgcactgggcgtcctccgggcaggcggcgcggtcctcggtcagcagccccaccgcgccggtcacgtccccgcccgccagtaccggtgcggcgcatagcagtacccggggtgcgccctcgcagggcagcaaggtcttttccggattgccggggctctggtagggcttgcgggcttccatcagcttttccagcggctggctgatgctgcggtctgccagctcccgccgcccgctgccgctgaccgccagaatgcggtccctgtcgcacacaaaggcggtcagcgcaaactggcggctgagcacctctgccagctgagcggcaagggtgttcacctcgcccatgggcgaatactttttaaagatcacttccccgtcgccggtggtaaagatctccagcgggtcgccccgccggatgcgctgggtgcggcggatctccttggggatcaccaccctgccaagctcgtcgatgcggcgcacgataccggttgctttcatttatagtgtcctccttttggtttcctttgtatgtagtatctgtcagcggcggcaaattataccggcatcgcattttttgctttgcccgccgcattgcgttccgggcggggttctgctacaataaataggaataaacccaaagaaagcaggtgtccgcatggcacacatccttattctgggcggcggtgccgccggactggccgctgcgctggcggctgcacaggccgcgccctctgcccgcgtcacggtgctggagcgcaaccccaagttgggcaaaaagctgctggctaccggcaacggccgctgcaatctggacaacaccgccattgcgccggaaaaatatttcaccgccgaccccgccgcgctgcggcctttgctggcggcggtggatgccgccgcgccgctggcgtggttcgagcagctggggctgtacacccgcaccgatgaagccgggcgggtgtacccctattccaatcaggcggcagacgtgctggcgctgctggagctgcatttgcagcggcacaccgtacagctgcgcaccggctgcacggtaagcaccctgcgccagagcaaaggcggctacgcggtgcagtttaccaccgccgagggcggcaccgaaagcctgcgggcagatgccgttatttgcgccatgggcggcgccgccgggccgcagttcggcacagacggcttcggcacccgctttgccgccgactgcggcgggcagatgcgcccgctctacccctgcctgaccgccctgcaatgcgcaaagccgaacaagagccttgcaggcatccgcgccaaagccgccgcccgcctgctggacggcgaccgggtgctggcagaagaaatgggcgaagtacagtttaccgactacgggctttccggcatctgcatcatgcagctgtccggcctgcttgcccccgggcgcagcccgaagcacccggcagtggagcttgatctcttccccgctgtgccggagacagagcttgccgccctgtttgcggcgcgtgcaccgctgcttgccgaggacacggctgcggcgttctggctggggcttttgcacggcaagcttggccgcgccctctgggctgccgctgccctgccggataccgccccccacgccctgcccgcaggcagctggcaaaagcttgcccacaccgccaagcactggcggttcgaggggcttgctccctgcggctggcggcaggcacagaccaccggcggcgggcttgccctgaccgaggtggaaccgaccttccagttcaagggctgtccggggctgtactttgtgggcgaaacactggactgcgccggaagctgcggcggcttcaacctgcactgggcgttcggcagcggccttgccgccgggcgggacgccgcaaagcacctttgcagccgaaaacggtaacaaaaaagggatcctgaaacgccagctggcgcttcaggatccctttttatttttactcgcccttggaaagcagctttgcacgctccagcgcggggcgcagtgccagatacagcaccacggcgcaggcagtggaagccacactgttcacaaaggtgacgccgccggcgatcttggtcagcgcctgtgccacggtgtactcctgcccaaagatgtacacgttgcggaagtagccaaggaaggggtcggtgaacacgttcagcagcagaccggaacccgcagaaacgatcaccttgaccagatacccggcgctgtgacgatcctgatcccgcagcttgaacaccttatgtgccacggcaccgcaggtgatgccgatgatgaacttgagcacgaaggtggtaatagcgtagcccgggtcaccggcaaggatatccgccagcgccagaccgatggcacccgccagaccgccggatacaccgtccagcagcagcgccgtcagggcggtaaaggtgttgcccagatggaacgaggagccgccgtagaacgggatgcggaagaacaggtaagctacaaggctcagcgcagccatcacgccggtaagcgccagctcgtgcaccgtaaagcggcgcttgtacagcacactgaaaaacaggatcaggataacgacgactgccagcagcagccacattgcagtagtagacatgatactttccctccaatcgcgccgataaccccacaaaaccacttgacatttgggtgtccggcgggtatgctcctattatacgcagaactgaccccatgaaaatacccagaataaagtttttttatggggtcagtttgacgcaatgcccagacaggagggacattctatggtacatctgaccacggcactggacccggcttcggcggtgccgctgtacgagcagctctaccgcaaccttgccgccgagatgcgggcgggcaccctgacggcgggcacccggatgcccggcaagcggcggctggcggcggagctgtcggtctcggtgaacacggtggacactgcctaccagatgctggcagccgagggctacctgaccgcccgggagcgcagcggcttcacggtgcaggagtatcttgccctgccgcagggggtgcagccgcccgccgcgccctctgcgccggtgacagcgcaccccgccgacaccgccccgccggtgcagttcgatttatctacccggggcgtggacccgggtctgttccccttccgcacatgggcgcggctgcaaaaggaactgctctattccgcgccggaactgctcactcccggggatgcccggggcgatgccgctctgcggcaggcgctggcagggtatctggccgagtaccggggcgtgcagtgcgacccggagcagctggtggtgggtgcagggctggaatatctgctggggctgctggccccgcttttgcccggccctgccgccgtggagactcccggctacccccgcgcccggcaggtgctggaaaacaacggcgtgccctgccgctgcctgccggtggacgcggacgggctgtcgctgacagccctttccgccagcgatgcagcggtgtgctacgtcacccccagccaccagttccccaccggagtcaccatgcccgccggacgccgcgccgagctgctgcactgggcagcccgcgccccgggacggcggtacatcatagaggacgactacgactccgagttccgttttgacacccgcccgctgcccagtttgcagggcatggcgggcgcagacggcccggtggtgtacctgtccacctgctcccgcagccttgccccgggcatccgcatcgcctacatggtactgccccggcagctgctgggcgcatggcaggccaagtaccggctgtactccggcacggtagggcggtttgagcagcagacgctggcacgctttatcaccggggggtatttcacccggcacttagcgcgggagcgcaccgcctacaaagcccggcgggatgcactggtggcggcgctgcgcacctcctttgcaccggaagagctgacccttgcggggctgcacaccggcctgcacctgctggcgcagctgaaagacccgccgccggacgccgccctgcgggctgctgcccggcagtatggggtgcgctgttccctgctgagcgactacgacctgaccggcacggcgcattctgccgccgggacactggtgctgggttacggctcgctgccggacgcggactgcgccgccgccggggagaggttgaaaaagctctgcaccgccgcccgggaggcatcggacaccgtatagtgcccgcccgaccagtccccgggcagggcatcggcggtgatatccaccggctcggcgctggtggctaaaaattccagcgtgcgttccagtgtagcaaggtctacggcggtcaggctggtcagcaggctgctgctcacctcccgcagaccctgcggcagggtggtgggcagcagctccagcgcctgccggaaaaaggcatcccacaccgccgcccgcgcggcggcgctgcgccggggcgaaagagaagtgtcggcatccagcgccactaaaaagctgtgggcatcggcggcggagatgccctgcaccccggtgcctttgccgtaccgcgccagctgctccggggtaagcgccccggtaaagcccacccgcactgcgccgtaccgcgccgccagttttgtcagcaccgccggggcgatggcaagatagtcggtatcctccggcagggcgaatacctcgcccagcgcttcccggcagcgggcagggcctgcggcggtgtagcagtccgcaaggggaacgtttttgcccccaaagggcacttccagcgcggcgggcaccgccagcagatggatgcagttctgcccggcgttcaggtaagccaggacaaagcccggggtctcgtctgccacgcacagcagcacggtgcaccggtcggtagctttgggcagacggatgggcaccccgctctggctttttgcggcctgccgcagactgctgcgcagctgggcgcggctgagcagcaccgtgccgcccaccagcggcagcagcaccagcagggcggcgcacagcgccgcccagaagggacgccagccgctgcgttttgcgtgtttcatggctctgcctcctttttgtgcataaagcatagcccaccgggcgaccctttatgcagaaaggcagggatgctgtatggataaagcagaaaaccccaacgaaaaaaaccgcgaggaacaggaggacttctggctgacgctggaaccccttcccgtcccagaccctgaaaaatctccgctgcccgcaccgcatgaggactaaggttgctgcataggatacggtaaaaaaggggggatgggatgccggaggggttcatgcggggagtcgaggctttgaacggcatcgtgtgggggccgatggggctggggctgctcttcggcaccgggctgctgctgacggtgcgcaccggaggcttccagctgcggcggtggggctactggatgcggcacaccctcggtgccatcctgaccgaccggagcgtcaccgcccataccgcccgcgaggaacaggccatcagccagttccagagcctgtgcaccgcgctggcgtccaccatcggcaccggcaaccttgtgggggtggcgacagccatcctttccggcggggcgggggcggtgttctggatgtgggtcatggcgctgctgggcatgatgaccagctacgccgagaacgtgctgggcatctactaccgccgcaaagacccggcgggcggctggcgcggcgggccgatgtactacctgcgggacggccttggcggcaagccggggcgggtgctggcggtgctgtttgctgcgttctgcgcgctggcaagctttggcatcggcaacctgagccagctcaactccatcgcgggcaatctgcaggcagcttttggcgtgccggaggccgttaccggcgcagtgctggcggcagtatcggcggtgattttgctgggcgggctcaagcgtgtggctgcggtggcagaaaggcttgtccccgccatggcgctgctgtacatcgtgggtgcgctcaccgtggtgggggtgcacatcactgccgtcccggcggcgcttgccaccatcgtaaagggcgcgttcgggctgcgggccgccggtgggggcatcgtaggctatgggctgtcccgggcggtcacttggggcttcaagcggggtgctttttccaacgaagccggacttggctcctcggtgatggtgcacgcggcttccaacgtaaaagagccagtgcagcaagggatgtggggcatttttgaggtgtttgcggacaccatggtggtgtgcaccctgacggcgctggtggtgctgacctccggctttgtggatctggacaccgggcgcattgccgccggggcggcgggcagtgcgctggttgggcaggcctttgacgccgtgtttggcacgctggggtcaaagctcatcgcagtgtgcatcctgctgttcgcctactccaccgcgctgggctggagctgctacggctgcaaagccgtggagtatcttttcggcgcgggggcagggacattttaccgggtgctgttcgtggcgctgatgccgctgggcgcggtgatgcggctggaccttgcatggacgctttccgacaccttcaacggcctgatgatgctgccgaacctcatcggcgtggtggcgctgtccggtacggtggtgaagatcacccaaaaccacctcgcccgcaagctgcacggcagcgccgcgccgccgctgttgtctgcgggtgagacgatttaaaatcgtcagccgtccccttgtcccaaggcggggtttgtgctatgctaaggggtacaagcgattttttgcgctgagaggaggaaccccatggccgccgtaaaaacacggaataccgctacccttatgaccgagggcagcattgtaaaaagcctgctgctgtttgccctgccgctgatcttcggcaacctgctgcagcagatgtacaacaccgccgacagcatcatcgtgggcaattttgtgggcagcaatgcccttgccgccgtgggttccagcgggtcgcccatctacctgctcatcggcttcagtcagggacttgccgtgggcgcgggcgtggtggtgtcgcagtatctgggcgcgggcgaccacaaggagacccgcgaggcggtgcacacctcccttgccattgcggtggtcatggggcttttgctgacggtgggcggcgttgcctgcgggcgcgctttgctggtggccatgaacatccccgccgaggtgctggccgatgccgtgacctatatccgcatctacttcggcggggtgctgttcagcgtggtgtataacatgaccgccggcatcctgaacgccgccggcaactcccgccgctcgctggtgtatctggcatgggcgtcggtgaccaacatcgtgctggactttgtgttcatcgtggggctgcggatgggggtggcgggcgctgccatcgccacagacctgagccagctggtgtcctgcgtgctgagcctgcgctttctgatgaaaagcgaggacgcctgccgggtggagctttccgccatccggctgcacagcaaaatggcaggccgcatcatccgggtgggtctgcccaccggcatccagaacatggtcatctccttttccaacgtgctggtgcaggccagcgtaaacagctacggcgccgccgccatggcgggctttgcggcctacatgaagatcgacggcttcaacattctgcccgtcagcagcatcagcatggctgccaccacctttgtggggcagaactacggtgcggggcgtctggaccgggtaaagcgctcggtgtgggtcacccttgccatcggggtcatctacaccctttgcaccggcgcggcgctattggccggacaggacgccattctgcacctgttcaccgccgacgaggccgtagtcacctacggcaagctggctatgcggtggttctgcccgttctacttcctgctcagcatcctgcacggccttgccggtgccgtgcgcggcacgggtgccagcatcccgcccatggtgctgctggtctcgctgtgcctgttccgggtggtatggatccagtttctgctgcccttcttctccggcatcgagggcgtgttcatcctctaccccgtcagctggggtctgggcgcattgctcatgatcctgtatgcgtggaagggcaagtggatggagtatcatacataaccatttttataaacaacgacccgccgcactgaaggaggtgcggcgggtcgttgttttttcaggaacttctgtcaggacagcttaccatgcaaagcccacggagtccatgtcgatcttcttttccatcagacccagacggctctcgatgaagttcaccgccatatccggccactgggcgatctgggtgtagtaatccacatagcccttggtgccagtgcccaagcccacaccgtggggcgcatcgggtgccagatagaagctgaaatccttgaaggtattcgcgcactccggcagagagggcagcatcatagcgctcaggccgtccttctgccccacaacaccaaagaccgggggcaggttggggttcttcgtgaagtccagaccggtgacgaacagtccgtagatggggatcgccacatttaggtcagcgctctcatagtccacagcatcgcagacgtagctggggtagaccttatccggggtattcgtagtgccgaactggtcggccaccacctgcatcacattcatgccgccagcagagaagcccacagcgatcatgatatcggtcttgccgatgtgtttttcagaggcgttgtggcggatgtagcggatagcgcgtgccagatccagccgctgatccacagcggcataagggttgacgcggcgctgcagcacaaaggcgttgtagccgttcttgttgaagaactcggccacagggtagccttccaccacgttgttgcggtgggtgctgccgccgcctgcaataatgatcacgttgcccttcaccttgccctgatctcgcagcaggtacgggttcaggaagggacggaagccctcgttatcgtagcaattttcccagttggtgggcagcggagattccacggccatctgatctccccaaatttcccaaacggtgctcttggggtccttgatctggcgcagcgccttgcgggcattggtcagagcaacacacatatcgtagtgagaagcattgatgccgggcgcagctgcaccgtccaccttctcgtactgagcgcgggacagcttgtggaacaacacatagaacttgtcaaaatcgccccggaaagcagccggataaaaggccacctcgcgggagagacggagttcctctgccaccatggcctgcacctcagcatcggtgtgcacgccagcgttctcagcaaaggatgcgggcgccatgccagccactgcgcccatggtcacggcagaagcggcggaaagcttcataaagtctcttctgttcatcatcatttctccttttaaatgcagacggctcatttgtgcagaacaaagccgcccgaagctgtacagcaaacgccctgctgccgggcccaacggacatttcgacagtatcgcgccgtcggaatctgtgcaaagcgtatcacaaatcagatggattgtaaatagatttcatcgcttttgagcaaaattgatatattagtatgccagttcttgtgaaaatcgacaggcgttggacgggcacaaaaaaggactgccgtacagcgcgcggcagtccttttgtatcttattacagcttttcaaacaccagaaagcggaaggcgatggtggtggtgagctgcggcagagccgcaaggcgggcggcaccgtcgcggggcgttttccagtagtagggggtcatggcgaacagggcttccagctgggcggcgggcacggtgatggtgccctgcacctcccgctcgtcgatggcgcggaaacccgggtactccacctgctgcaccgggttcttgtagggcttttcgtagagcacggccttcatctggtacaggtgctctgcccccggcacaacgtagatcatgcgcccgcccgggcgcagcacccggctgaactcctcctgtgcaaagggcgaaaagcagttcagcagcacatccgcccagccggtgcgtaccggctggctgaagctggacgccaccgcatactgtgcagtgggcagcgcctttgcagccagccgcacggcgggctttgcgatatcgaaccctgccagctgcagcggtttttccgccgccgcgaactgctgcgcgatgcagcggtcgtaccagccctcgccgcagcctgcatccagcagatgcagcggagcgtccttcgcggcgggcacgccgtgggcaaggcacagctcccccagcgcctgcccaaagatgccgtagtatccggcgttcaggaaggcgcggcgggcggctaccatctccttgctgtccccgggagctttggtgcgcatactctgcaccggcaaaagatgccagtagccctcccgggcacggtcaaagcagtggcctttttcacatttcaggtcattctccccttgcagcgcaccgccgcacagggggcactgccacggggcaaaagcttcgttccggctcatacttcttcgctgtgatcctcaatgggtgcggtagcaccgccgtgggcgtccatatactcctcaaagctggtgtacttctgctggggcgggcggcggctgatgagcatcagccccgggtcctcgtcccgggcggcagcattgcggccacggcgggcaggctcggccttgggagcgcggggtacgctgccggtgcggctctggctgccggcattgccgcgctcgttacgggcagggcgggcgttgttgctctgggctgcggggcgggcattgcgctgttcaccccggtcgctgcggtcgttgcggcggctgccgctgcggtttgcgttctggttattctggggctcctgtgcgctgcggataacaggtgctgccggggcggcagggatcttgcgtgccgggcgcagcggagtagcctccggggcgctgacaaaatgggggtcaaacttgggctgggcgttgctgccccgggcgggggcggcattctcgcggcgggtgcggggcgctgccgtctccttgggggcgtttgcgccccggttgttggcgcggcggtcgttgcggaccccgcgctttgcgttgctgtcttgcatcagtgtttcctcttttttcggttttgcaggcaccgcgttctttgcggccttcggctcctgcttcggcgcgggcgcagctgcctttgcagcttttgcgggcgcagtttcggcctgttttttcggcgcttcggccggtttttctgcttcggggcggggctttttgccgcgcacgggcagcaccggacgcaccggggcgggcacgccgtcccacggatggccggataccaccgggatcttgcggcggttcagcttttcaatgcctgccagatactcctgctcctccggggcgcagaagctgacggcggtgccgtctgcaccggcgcgggcagtgcgcccaatgcggtgcacataggtctccggcacctcgggcaggtcgtagttgaacacatgggaaagctcgctgatatcaatgccgcgtgcggcgatatcggtcgccaccagcacccgggtcttgccggacttgaagtcctccagcgcggtgacgcgggcggtctggctcttgttgccgtggatggcggcggcggggatgccctgctttgtcagatcctttgcgatcttatccgcgccgtgcttggtgcggctgaacaccagcgcgttgaccaccggcggctgcaaatttttgatgagccacggcagcaaaagcttcttgttgcccttttccacatagtacaggctctgctggatgcggtcgaccgtgctggacaccgggtccaccttgacaaaggcaggctcgtgcaggatgccggcagccagctgctcgatctcggcgggcatggtggcgctgaacatcaggttctggcgctgggcgggcagctttgcaatgacctttttcacgtcatggacaaagcccatgtccagcatccggtcggcctcgtccagcacaaagatttccaaagcggacaggtcgataaagccctgcccgatcaagtcgttcagccgtcccggacaggcgatgaggatgtccacgccctttttcagcgcttccacctgcggtgcctgtcccacgccgccaaagatgacggtgctgcgcagtttcaggtacttgccgtaggcttcaaagctttcgccgatctgcaaagccagctcccgggtaggggtcagaatcagggcgcggacagcgcccttgcggcggggtgcgttggcggtgagccgatccagcatgggcagcgcaaaagccgccgtcttaccggtgccggtctgggcgcagcccatcagatcccggcctgccagcaccggcgggatggccgctgcctgaatgggcgagggggtctcgtagcccgcttcctgcacagcgcgcagcagcggggcggacagattcagttctttaaatgtcatggttctcctattttattctgtgatcttccggcactcgatgtagtagcgcttttcctccgcgtgtcccatgctgaaggtcttgcggggcagcacaccgcccatcacaacgccgcggaacaggtcgctcttggcgaagggcggcatcaaaaacgccacggcaccctgcttgcacaaagcgcgcacagccggttcgtcatgcacatagtccacctttgcttccgggtggcgctcgatatagtccgaaataaaatcgtcgatggtgcccacggtcagcggctcggtggggtcctcaaagctgagcacattggccatgtgggggcctgccagcgtaaaaggctgctttttgttgccgccaaagcagcagcctgccatgttggcatcgctccatgtaatcaggctcagcagcacggtggcacagtccacgttgaacagcacccggtggatgggctcgatctcaatagccggggagtgcacgttgcacacctctgccagacaccagcgggcggggtggttctctgcctgctccggggtcagggtctttttcagctcctcccagcaggcctttgcagtagccagcgagtggttgccgtcgcccaccgccagcgtcagcgggtcgcggcgggtggcatcggggtatttcttgtcaaattcttcctgactgcccagcacggtcagcgcgttttcgatctgcgcgatgagggcgggatcctccaccgcccagccggccacatgaccgccgcccagcatcagctcgccctcgtacaccttgggcaggctgtccttgtgggcggcaatgggctcgatgagggtgcagtccgggtcatccgccagcatcataatgtggggcgtttccagcgcagcgccggtgcgcaccttcatgcggggcgggatgcggctttccacggtgcactcgctgggacgcacggtgcatttttcgccacggcggtagctgtaagcttccaagtccacacgccccacaagaccctgccgcacccggccgctctgctcggtgcgctccacatagataaagccgtccaccgcccgggtgagcacgttctgggcgtaatcctgcatggtggcgtggatcttttccacccgcgcgtcagcgtctccgtcctccagatacacctccggcaggatcaggttcagggtgctgggcgcacccgcagcggtcttttctgcccgctgccagtagctgcggtcactggtgaactggtcacaggcaatgcagccccactgctccagcggcacctgctccgaaggcagcaggatgtgtgcaggtgcaaaacaggtagtcggtttcatagtcgtttcctcccctctttataaaagccgcttctcagcggaatgctgcggcgtcgtgcactacaagatgctgcacaccggcgtcggcagcggcctgctccagcgcagcgcggctgtccgcatccagtgcggtactgctggtgaccagcagattttccatgccaagggacgtgccggtggtgccaagggcatcggtggcagcggtgcacagtgcgtccgggtagctgacccacagggtcacgctgcctgcaaagcgggtctgccacgcagcgatatcggcggtaagctgggcggcgcgtccctcccggctcttgccgccggaagcgccgaagtcctgcttgcgggtgatgatattggggaactgcaccccggtaagcaccacctgctcgtagcccatgccctgcacctcttcaatgaggtcgccgacatactgcaccgcgcttgcggcaaaggggttcatccacgccttgccgcccttggctgcgctgacgttgtccagccagaggctgttgccgtcgtagtgcacgcccatgctgcggtcggtgtacaccgacaccgggtcggtaaaggcggcaagctgcgccgccgggataatgccttcttcccgcaggatggcggcgatgcttgccgcatccaccgggctttcggtgatgctttgggcggcatttgccaccccggaagcgtagtacaccgtgccagcggcgtccttcagggtgacaagggcatagtctgcgccctgctgcttcagctgccgggcagcggcgcggatggcggcttcatcggtcagggctgtcacgtccagctctgcccagctgccgccggtgatggccttgccgtccagcggcttttccttctccggctccggctcagacgctgcctgcgaagcggcggcgctgcttgccgccgcagaggaagcagctgcttcggcgcgggaagcgctttcggcttccaagtcccgatccttgaccacggtataccatgtgtgggtggcccaatccagcacatagggtgcggcaaaccatgcggctgccagcactgccactaccagcacaacaatgccgatgccgcgctttacgcgcgtttcccggctgtaaaagctgcggttataatgcttgaccttctgacgtttattcttagccatggtatcctttcctccctgtctgcattacaggatgacggaatgtccggtaaagccatagattgccagcgccagcacgccgatatacaccagcgtgatgggcaggccgcggaatgctttggggatggctttgctgcgcaggcggtgacgtgcctcggtgaccagcagcaccgccagcacatagccgatgccgctgccaaggccaaagccaaggctctggccaagggtaaagctctgggtgcgctccaccagcaccgtgcccagcacgccgctgttcagcgcggccagcggcacgatgcgcagcagctgggcgcggcggggcaggctgcgcagcagccacagcaccagatgctctgccaagcaaaccacggcgatgctggcgatatacaccagcgggcgcagctgggcgcggttatccagcggggcgatgaatccgccggcaatgaaagccacgggtgctaccagcacctgcgtgatgcacagcatcatgccgaacaacgcgctgctggtgcggtcgtcccccaccagctgcaccatgcgggacacgcccaatgcacgggtaaagacagcgttctgtgcaaaaatagccagcagtgcatagctgaaaaacactgccgagctgcttacaacttccttcacggttcgcggtccacctccttctggtagtgcacggtcagggtatcctgcgcttcctttttcagaaattccctgcgctttgcggcagcggcgcgccagatggcgcacaggatgcccagcacgataaagccgcccgccggcatcttagccagcggcagcagcgcccagcgccccaccggggcaccgaacacggtgccaaggctgagccactcgcgcaccatgccgatcacgagcagcagcagcgcgtagcccacggtgatgcgcacgcccttggaaactgccttgtgcaccgtctcctgcacgcggccgaagcggtaagtcagaagcggctccactaccagcatgggcaggtagatgccaaggttcaaaagacccgtgccgaacacaaggttcaggatgggatacgccgccagatacaccacagcggcgctggctgcgtacagtatagcgcggggcagcagttttttttgcagctgctccggggtaggctcctcgtcccgcaggggcacaaggcggctgagcaggcaggccagcacgcgggagggcaccagcagcagcgccaccgccgccgccagcatcaggctgttctgaccggtggtagccacgaccaccagcggtgccagacccatgccctgcatgaccaccgggttattcaggaacacgcggtcgtgatgggcaaacttttcgggatcttgcaagatcagttccgcagtacgctttttcattccgcagcctcctttcgttcggacggcagacggtgcagcagacagtacagccgctcctcggtgcggtcaatgagcgcggacacactgttgacggccagcagtgcaaagcagacgccggtctcgtacacgccaaaatagcggaagcccatggtggcgatgcccaccagtgcgccgtacaggatgcgcccaagccggtggtgcgcacaggtgtatggctcgttgagcaggaacaccgcgcagaacagcattgcaccagtgtgcagctcgtcccggacgccctgcaagcggggcatcaggctgctgaagagggtgctgtctgccagacctacctgccgcgggaagaagaaagcgatgagcccgcaggtgatgagaaagctcgctgatgcgccgatgtgcacgtccttctgggtccacagcacaaggccgcaggccagaatgaccagcgctgcgccggtgcccatgggggcggcaaactcgcccagcgcgacggcgagagagttcaggttcaggatgccgccgctgcgcagggtatcctcgatggtgctgctcactggcacggcggaagcgtcccacaggggcagcggggtgtagggctgcgggtagcgcaccacctgctccggccacgatactgccgccacggcgtagcccacggcagcggggttaaaagggtagctaccgtagccgccaaagacctccttgccgatgagcacacccgccagcaccgccaccaccagcacatagatgtccacggtggcgggcatgagcagggcgatgatcaggctgaaactctcgttggagagatctttattggtgtatacccgatggcgcagcagcgccaccagacggtcgcacaggttgccggtaagcagggcgacgccgcacagcagcagcggacgcgccccgtagaaatagcaggccatgcacagcagcggcacgcacagccagaaaacgtgcctatagtaccgcccggtcttttgcagctgccgctcctgctcttggatcaaagcttcatccatatacagccctccttacaggctggccagtgcgcccacagccgcagcggggtcggcagcgccgaacacggcactgcccgccaccagcacgtcggcgccggcttccacacacagaggtgcggtggcggcgtccacgccgccgtccacctccagcaggtaggaaaggccgcgtgcttcccgctccgtcttgagccagcggagcttgtccagcgccgagggcatgaacttctgcccgccgaagccgggctccacgctcatcaccagcaccagatccagctgatccagccacggggccagcgcctgggccggggtgccgggcttgatggtcagacccaccttgcagcccagcgcacgcacggcatcaatggtggcctgaatatcatcctcgcactccagatggaaattatacagggtagcaccggccttgatgaaaggctcggcgtattgcagcgggtggctgatcatcagatgcacgtcgtaaaaggcatccggcagcgccttgtgcaggcttttgagcaccggcacgccaaagctgatgttgggcacaaaatgcccgtccatcacgtcgtagtgcagcatctgtgcgccggcatccagcaccatgcggcagtctgcacccagcttgccaaaatcagcagaaagaatagaaggacttacgatggccataatatttcattacgctccgttatttttagcagtttttatcccacgcgttgtgcattttgcggggttttcccgcccggaaaacacacgggcatggttactctttagtttacatgaaaacggccaaaaaatcaaacccgcagccgtttttttcactgaaaagtcgtaaatagcgcaaaaagtccataaggcgaaactccctcagtcaaagcctatcggctttgccagctccctcggggagggagcctctggcgcacccggaagctttgcgctttagccggaaactttaccgccatgccaaaggccccatctcagaggacgacttcccccgcgccgggggaagatgtcgcgcagcgacaaaaaggggaatctggcatcgagcgcagcgagatgactgggggagtttcttcggcaacaacgccaaagcagccagaccgcccgggcggggcagtctggctgcaggtcttattctaccggcttcatgctggcggggtcttccaccgcgccgggctgaccggcggcgtccggcaagcgcttcatgccgccggggttgggggaacaggtgggcagagtgaacacaaagcggcaccactcgccctgctggctctccacgcggatctgcccgccggccagattgaccagcaccttgcagatgttcagcccaaggccggagccgcgggcgtgcaggccgcgggagcgatcctccttgtagaaccgctcgaacacatagggcagcgcctccgggctgatgccctgcccggagttccagatggagatctcggcttcggggccaagcttttccacgctgaagcggatggtgccgcccgccggggtgaacttgatggcgttgtccagcagattatacgccacctgatggatcaggtcggggtcggcgtagaccagcaccttttcgtccatggtcaggccttccagctcgatcatgccgtcattgatgcgctgctctgccgccagcgccacgccggtcagggtctcccagatattgaacatccgggcgttcacctgatactccccgctttccagcttggagagatccagcatattctggatgagccgcgccagacgcccggtctcctcgctgaccagctgcagatagtggttctgcatctcgggcgggatggtgccgtccagaatgccgtccacaaagcccttgatggtggtcatgggggtgcgcagctcatgggcgatattgcccatgaactgcccccgggagttatcgttggactggatgttctctgccatctggttgaaggtacgggcaaggtctgccacctcgccgtcgccctccacgccctccacgcggacggagaggtcgccgccgccaaagcgctgggcggcatcggtgactttttgcagcgggtcggtgagctgacgcatcaacaggcgggtcagcacgctggcgcacagcagcatcacgcaggcagacatgaggaagttggaccagaactgctgtttgaaatcggtgagttgcgcaccggaggagcacaaaaacagccagccgctgaacaggctctggtcgtcgatggtctccaccgccgcgatatagcttttttcggtcagggcgccgcccaaatcgccgaaagcgtggtagtgccgggcgtccgggtcagccactgcgttggcgcgctggcagatatccagcggcacggtgccggtggtaagtttgtccgggtcggaggcgatgagcacattgccctgccggtcggtgaaaaacagatacgcctcggcgctctcgccgatgatctccagtttggtgttcaaagcgtccagctctgcgccctgcggcatggtctcgctgtttaccagatattctgcggtgcgcttggcaacgtttaccacctgatccagtgtttcgtagcgatccttcgcaaaataatttttgaacagtacccactccgagcagcccatcagcacgatgcccagcaccatcagggtggacaccatggagaaaaaggccgtggagatacttttacgcattactgacgcacctcgaacttatagcccacgccccagacggttttcagctcccacttatcggaagcaccggccagcttttcgcgcaggcgcttgacgtggacatcaatggtgcggctgtcgccgtagtactcaaagccccacacctcgtccagcagctggtcgcgggtgtacacgcggttggggtgggaagccagacagttgagcagttccagctccttggggggagcttccaccaccttgcccttgacccgcagctcgtagctgttcatatccagacggaggttgtcgaactcgatgacgccctcggtgctctcggcggcagcggaggtagtctggcagcggcgcagcaccgccttgatgcgggccaccacttccttggcgtcaaagggctttaccatgtaatcgtccgcgcccaactccaagcccagtaccttgtcgaaggtctcgcccttggcggtaagcatcatcaccggggtgttgcccgccttgcggatgcggcggcagacctcaaggccgtccatgcggggcatcatcacgtccagcagcaccatgtccggcttgacggcgttgaacttttccagtccctcttcgccatcgttcgccaccgtgacctgatagccctccttggtcaggtacagccgcagcagctcgcagatgttggcgtcgtcgtccaccacaaggatcttttcgtttgccataagtgtttcctccccttttatgcaggtttttgtagtatttgcagcccttccgggcgttttgacagtctcttacccttctattatacggaacagttatgacaaaataaagaaggaagtgtagtttttttcacatttctgcccggatcatttcaggattccttactttaagatagcccctcccccttgcgctggcggggttcatcgcgtataatggtagatgtatcgttatgccaaaaaacgtgtaaggagcgtattttatatgaagttaggtatcgtcggcctgcccaacgtgggcaagtccactctgttcaacgccatcacctccaccaaaaatgctgaagccgcaaactatcccttctgcaccatcgagccgaactccggcatcgtggcagtgccggacaagcggctggacaagctggctgagatctggcagaccaacaaaaagacccccgccatcgtggagttcgtggacattgcgggtctggtgaagggtgcaagtcagggtgccggccttggcaacaagttccttggtcatatccgcgagtgcgacgccatcgtgcacgtggtgcgctgctttgacgatgacaacatcatccatgtggtggaggacgtgaccaaggccgaggccgtggaccccattgccgatattgacgccatcgactacgagctgatcctctccgaccttgaggtggtgcaaaaccgcgccggccgcatggcaaaggctgccaagagcggcaacaacaagggcgctgccgccgaagctgcttggctgcagcagcttgccgaccatctgagcaccggcaagcccgcccgcagctttgatttcgaccctgccgacaccgagcagcagaccgtgctgcacgagatgggtctgctgagcgcaaagccggtgctgtacgcctgcaacgtgggcgaggacgatctgatggagggcatcgagaacaacaagtacgtcccgctggtggctgcccgcgccaaggaggaggacgcccgctacatccccatctgcgccaagaccgaggaggatatcgcggattacagccccgaggaaaagaaagcgtttctggctgagatgggcatcgaagccagcggtctggacaacctcatcaccgccagctacgacctgctgggcctgatctccttcctgaccgacggcaagaaggagtgccgcgcatggaccatccgcaagggcaccaaagctccgcaggctgccggtaagatccacagcgacttcgagcgcggcttcatccgcgccagcgtcatcggctataacgatctggaagccaacaacttcgactacgccgccgtcaaggccaagggtctgcagcgcaccgagggcaaagagtacgttgtgcacgatggcgatgtcatcgagtttttgtttaatgtctgatatctgaatagcagccctgtaaaactctgccgggctcgccctctccgtctttgcttcgcaaatccacactcccctttttgtcgctgcgcgacatcttcccccggcgcgggggaagtctttcctcaaagggagaggccttggcaaagagatgaagtcagcgtggactgccaagggctccccctttgggggagctggcaaagccaacaggctttgactgagagggcgaggtcgctataagaaagcaatcctaccataaaaggagtccaccatgatctttggtattatgggcgctatgcccgatgaagtagaccagctgtgtgcaaagctggaaaatgtcaccgttgagccctacggcggcgtggagtaccacaagggtacgctggccggcaagcaggtggtggtgtgctgcgccggtatgggcaaggccaacgccgccgccaccacgcaggtgctcatcaccaagttcggcgcagagaagatcatcttctccggtattgcgggcaacatgaccagcaagatcggcatcggcgatgtggtcatcggcaaaacggtgctgtaccatgacgcccagctggatatgatctgtcagaacccgccgttcctgaaggaatacaccggcgacccggagctgatcgccgccgccgaagctgcctgcgccgaaaccggggtaaaggcactggtgggcaagatcgccaccggcgatttgtttgtgggcgacagcgagacgaaagccgccattgaagccaagtgcgccccggactgcgtggagatggagggcgctgcggtaagtcagatcgccgccaagaacgatgtgccctgcgtcatcctgcgcgccatgagcgacaacgccgacgaggacggccacgaggtactggtggtgaagaagttcagcatcggggagtatgtcgccaccgccaccaagatcgtggcagcgatggtggaaaagctgtaaaagcggcggatctgccgcgcacggcaaaaacaagcttgcatttggggagtcctgaaaaaacgcctgcgggcgtttcagggcttctttttttgcgaacgggtcagcagccttgtattccgccgcacaaaggcgtatactggggcaaaaaggaggtgtttgccatgtggttcgtttacgcgctggggtctgcggtgttcgctgcccttacctcgattctggcgaagatcggcatcgagggggtcaactccacccttgccaccgctatccgcacggcggtggtgctgctgatgagctggggcatggtgttcctcaccggcacccagaccggcattgcggatatctcccgccgcagctggctgtttctggtgctgtccggccttgccaccggcgcaagctggctgtgctactaccacgccttgcaggtgggtgcagcgtccaaggtagtgcccattgataagctgagcgtggtcatcactcttgcgctggcctttgtggtgctgcacgagcccttcaccgtcaaaaacctcatcggctgcgccctcatcaccgccggtacgctgtttatggtgctgtaacgagatatgcaaaacggctgctgcacgttcttgtgcagcagccgttttatcgtttttattcctcgccttttttcagtatatccagttccggcatcagctcggtgctcacgatggtaagcatctgttccagcttggcgcattcctcgggggtaaagcgctgccgggcacgctccactacggtgtgcaggtaagagtagctgatgttgtagtaatcgatatacttctgggtggggcgcagatggtactcccgccggtcggtggtggactggatcttttccacatagccctttttcaccagactgccgatcttatacgccgcattgggggtggagatctgcatcatgcgggaaaactccgcgatggtgggctcgcccatcgccatgatgccctccatgcagaaggactccaccgtggtcagggtagcctcacgggtggcaaaacgctggaacacgttctgataaaaatgcagcttgaatttggtgtagacgtcctgaaaagctttttccagcatgggtcatgcgcctccaatgctttagttttcttgctatacggctagtataccacgaaaatgccccgctgcatagcggaatttttacgcagcatccccggaagtttttgcccgggtgcgggcgcggatgacgctgagcaccgccagttccagcacgatggcaaccaccagcagcaccagcgaggtgagcaggtttgcgcggctgcccagcaccgcctgtgcaaggccggtgatgatgtagcacaccgccgagcaggctgccgccgtaatggcgtaaggcagctgggtggaaacgtggttcacatggctgcaatgtgcgcctgccgaggccatgatggtggtatccgagatgggagagcagtggtcaccgcacaccgcgccggacaggcaggcggcaatggaaaccaccagcatctcgccgtccgggaaggcctgacagacgatggggatcaggatggagaaggtgccccaggaagtgccggtggcaaaggcaaggaacaccgccacaaggaagatgatgaacggcagcagatactgcaaagccgccgcagagctgcccagcaggtttgccacataatactttgcgcccagcaggccggtcatgccggacagcgtccatgcaagggacaaaatcagcatggggctgaccatggccttgaagccctcggggatgcaggcggcaaagtcctgaaaggtcatcacgctgcgcacccggtagaatacaaaggtgaacagcagggcgatgctgctgcccagtaccagacccgccgaggcgttgcagtccgcaaaggcggtgatgaagtccacgccctcaaagaagccgccggtgtacaccatgccgaagatgcaggccgcgatcagcaccagcaccggcgcgatcaggtcgatgacatggccattggtatcattcccatcgtccacatcgtcgccgtagggacggtcggcggtggtaaacaggtcgccgtttttggcgttgtcctcgttcagcttcatggggccgaactccgccccggtaaagatgaggaacaggctcatcaccacggtcatgacggcgtaatagttataaggaatggtgcgcaggaacatggtgaagccgttgatgccagagcccgccgggacgctggaggtgaccgcagccgcccagctggacaccggcgcaatgatgcaaatgggcgcggcggtggaatcgatcaggtaggccagctttgcacgggacaccttctgccggtcggtcaccgggcgcatcaccgagcccacggtcaggcagttgaagtagtcgtccacaaagatcatcacgcccagcagcagggtagcaaactgtgcgcccgcccggctgtggatgtgggtggacgcccagcggccgaaggctgccgagccgcccgccttgttcatcagcgccaccagaatgcccagcatcaccagaaaggccagaatgcccacgttgccggagtccgacagcttggtgatcatgccgccgtcctcgttgaagaacagggtgttcagcgccagctcaaggttgccgttggcatacagcagcgcaccggaagcaatgcccaccagcagcgaggtgtacacctccttggtgttcagcgccagcacgatggcaatgaccggcggcagcagggaaaagaaggtgctgtacaccgcacaggtgtaggtggcggggtcggctaccttgccgggggtcaccgccgtgcaccacagcagcagggcaaagacgaacagcgcccccgcccaagataagtttttgtttttcataagctcctcatatcaagtatcagtcatcgtctgcggggttcgtccggcgtatcggggcgcaggctgcggggcagactacccacagaaacgcaaagggggtgtgcaccgtgccggattataaggccatgtactttgagctgttccgcgccagtgtgcaggctgtgcagcttttgcaggacgcgcagacccgcgccgagcagcagctgctggccgcagacttgccgccgctgcggctggacgaaacagaaccggacgatccttagccctttttggcctcggccttagcggcaaacttttcctcaaagatgataaagcgctcgtgggtgccgccgcccacagggcctttctcgtccgcaagcgtcaccttaaaggtcagcttgcggccttccacagccaccagctcactgtggcaggtcacggtcatgcccacaggggtgggtgcggtgtgctccagctccagcttggtgcccaccgtgccgctgcctgcttccagtgcaggggcaacgctctgccaacaggtcttttcggccagtgccaccagtgcaggggtggcaaacacgtccagcgtgccgctgcccatggtctttgcagtgttctctgcgctcacgcgcacgctctgctcgccgcagattccggtttccaacttcatatacagttcctccttatgcgtcctttggacgcagttgtgttatttgtggtcatacacctttataagatatcacaaaacgcgccggaatgcactattttttgcatattttttcagggggctttataccccctcagtctcgctgcgctcgccagctcccccaaggggacgcctttgcgctatgccgacaactttcccgccaccactgaagccgtccccttggggaaggtggattgccgcgcagcggcaagacggaaggggtacgcccggcaagccgctttgcacttgagccgcaaactttcccgccatgccaaaggctccctcccagagggagctggcaaagccgtcaggctttgactgagggagttcagccgtccccttgagggccgacttcccccggccgggggaagatgtcgcgtagcgacaaaagggggagtgtggctgcgaccaaagggagcagacggaaggggtaaacccgcaccctgtttgcaaattaaatttgcatcttttttgcgttttacggcgattttcagcaattttgcggcaatgtaaaaaactttgcggattttgcttgacagggggctgtctgcgtgttatcatgaacgcatgaacagatgctcatatatcgaaacgaagggagaggacagcatgaccgggctagaacaagccgcaccggaaaaggaaaaacagccggtggagatgccggatgacgaggtgctgtacgaactggcagatctgttccgcgtgttcggcgattccacccgcatcaaaattttgtatgccttacatgacagcgaactttgcgtgcaggatatcgcggacgccgtgcagctgagccagtctgccgtcagccaccagctgcgggtgctcaaggattccaagcttgtgcgcttccggcgggagggcaaaactgttttctacgcactggacgatgaccatgtgcgcagcatcctctccatggggatggaccatatcgaagaatgaccgggcacacgcccgcacaaaaagaaaggctggtacttattatgaaaaagacctacaagatcgaagtggactgcgccaactgcgcccagaagatggaggatgccgccaataccgtttccggtgtggaaaaggctaccgtcagctttatgacccagaagatgaaggtggagtttaccgagggtgccgacccccacgccaccatggagaacgtgttgtctgcctgcaagaaggtagaggacgactgcgagatctttgatatctgatgtgcggcaggttgctgcacacggtcaacagcctcgccctctccgtcacctgcggtgacacctctcccaaagggagaggccttggcaaagagatgcagtctgcgtggactgccaagggctcccactttgggggagctggcatcgcgcagcgatgactgagagggcgaggacgctaaagaaaaaagcatctgcagcaagaattcgtagatttttctggaaccccaaaacgaatgcagcagatgctttttactttgtgtgtgattacgttgtgtaacaactttttctgtggaaaaatccgccacttttcaacaatttccaccgggttttcaacagactttgcggaaaaagagaaaaagaagcgtggaaaagcgcttttttagcggaaaactgtgtggaaaacgcgggtaaaactgtggaatacccatttttttgccgaaaaacctgtggaaaaccacctgtttttcacccgatgcaccccaaaacgaggagcgttgcttatgaacaagaaacaaaaaaagacccttgagcgcatcctgatcgctgtggcgctggtgatcgtgctcaagcttttgcccgccttgcccatgccggtggagctggcgctctactgcatcccctaccttgtggtgggctgggacgtgctgcgcaaggcgctgaagggcatcaagaaccgtcagccctttgacgagtgctttctgatggcagttgccaccgtgggcgcgtttgcactgggcgattatgtggagggctgcgccgttatcatcttctaccagatcggtgagctgttccagagcgtcgccgtgggcaaaagccgccagagcattgccagcctgatggatatccgcccggactacgccaacatcgaaggcgaggacggcaagctggaacaggtagacccggatgaggtcgaggtgggcaccgtcatcgtggtgcagcccggcgagcgggtgcctattgacggcgtcatcgtggagggcgcttctgccctgaacactgccgccctgaccggcgaaagcctgccccgggacgtgaacgccggggacgaggtcatcagcggctgcgtaaacatgaccggcctgttgaaggtgcgcaccaccaaggaatttggcgagtccaccgtctctaaaattctcgaccttgtggaaaattccagcatgaaaaaagcccgggcagaaaactttatcacccgctttgcccgggtgtacacccccgctgtctgctacggcgcactggcgctggctttcctgccgccggtggtgctgctgcttatgggacagcccgcccgctttggcgattgggtctaccgcgctttgaccttccttgtcatcagctgcccctgtgcgctggtcatctccatccctctgagcttcttcggcggcatcggcggcgcttcctcctgcggcatcctcatcaagggctctacctatctggaagagctggcaagcaccggcgttgtggtgttcgataagaccggcaccctgacgcagggtacatttaaggtcactggcatccaccccgccgagggcgtgaccgacgctgcactggtggaagccgccgcactggcggaaagctggtccaagcaccccatctccctgagcatcaagactgcctatggcaagcccatcgacgccgcccgggtcacagacgtgcaggaactgggcggtcatggcgtgaccgcgaaggtagatggcaggaccgttgccgccggtaacgcccgcctgatggaaaagctgggcatcaccgtgcccgccgtagagggcgtgggcaccatcgtgcacgttgccgtagagggcagctatgcgggctatctgctgattgcggacgtggtaaagccccacagcgccgatgcgatccgtgctttgaaggcctccggcgtgcgcaagacggtcatgctgaccggcgatgcacagccggtggcacaggcggtagcgcagcagctgggtctggacgagtaccacgccggtcttttgcccggcgacaaggtggaccagatcgaaaagctgctggctgaaaagcagcccaaggagaaccttgcctttgtgggtgacggcatcaacgatgcaccggtgctgtcccgcgcagacgtgggcatcgccatgggtgcgctgggctcggacgccgccatcgaagccgcagacgtggtgctgatggatgacgaccccgccaagatcgcgcttgccatgcgcattgcccgccgcaccctgcgcatcgtgcaccagaacatcgtgtttgcgctgggcatcaaggcgctgtgcctgctgctgggtgcactgggcattgccggaatgtgggcagccatctttgcggacgtgggcgtgatggtcattgccgtgctcaacgccacccgcgccctatataccaaagaccttgccggaaagtaatggtctaagctgcacatccttagcaaaaagaatattttttgaggttcaggaaggtctgcggacttttctgaacctctttttttaacagaagcagccgcgcagggggggatctttctgctgtccgtttcaaaaagcgacgaatcagccaaaactaaccgcaatgtgtttcaagaagtaacatattgcgacaagaaaattgaacaaactctgaatatgtttcaaaaaagaacgcaacaaaccaaaaaatgattgtgacgcacagcggaaaactatatacttttaatcaagaaagccgcatcggaattgtgcaaagggtcgggctcttgcgcaacaggtactgcggacacaaaaaaggaggacacgttctatgacacttcccatgatcattgctctggcagtgactgtcctcatgatcatcctgatcatggtggataaactgcccttcggtgcacccccgctgctggcgctgctgctgctggtggtgttcggcgtcaccgacatcaagaccgccttcggcggcttcgcaaaccccaccatcgtcatgctggcatccttcatggccatcatcgcggccttgcagaagaccagcttcatcgtcaagttcaagcagaccatgttcaacatggccagcaagggcggctttaaggcatacgtcctgctgatcctcatcgttatgctgggctgcagcctgttcggcaccggttccaccgcctactatgtgctggtcatcggcctgctgtccactctgccctactccaagcagctgcccccgtccaaggtgctgatgcctgcgggctttgcagcaaaccatccgctgctgcccttcaacactgctctgcagtacggcatcgtgatcgccgttctggaaagcgcaggcgttgcggcaaatgtcaatctggtcaagttctctctggtcaacctgtgcctgtccatcggtttcctggtgtggtgcatcctggcttacaagatcatgcctgaccaccccattgccgaggccaaggaagaggctctccacgccggtgagcagaaggttgctctgaccaagaatcaggagctcatcacctacttcagctttgtgctcgccgttgtgggcatgatcctgcagagcaagatcggcgacgcaggctacgccatcaccggtctggccgtgggcgtcatcctgatctccggcgttatggacttcaacgagatccgcaactccatcagcgcacccatcatcctgatgtccgcaggcgtcatcggcattgccgatgctctgggcaacaccggcctgaccagtctggtgggcgagaccgttgccaagatgctgggcaccaacgtcaaccccttcgtgctgatcttcgctttctgcatcctgaccagcctgctggccaccctgaccggttccaccatcggcaccgtgtacgtctttgctcccatggccattgccacctgcgtcaatctgggtctggaccccaccgcagccgctgccgctatcgtggtctccggctggtgcggacacttcctgcccattgacggtatgcccgccatgatcatgggcgccggtgactacaagatcaccgagttctggaagttcaccattccgcagtatttcatccgtctgctggcgctgacggtgggcgctgtgctgatcttccccatgaagtaacaggagaaacaccaaatgaaaaacacgtttgagctggagcacgtcggcatcaacaccgacaacgcaggcgaggccgagcagctggcgctgctgctgtgcaagctgttcaacttagagccccgccacggacagaagtccgagtttgccggcaattatttcgagtgcatgaagagcccctttctgggcaagaacggccacatcgcaatgcgcacccccgacctgaaggctgcgatggaggagctggaggaaaatggctttagcttccgcatggagactgctgcctattttgaggacggccgcatcaagaatgtatatcttgacggcgagtacggcggctttgccatccacatcatgcagaaataacgccaactgaccgatcttgtgcagaaccggggatggagtgatccgttcccggttctgcaggttcatgccccgcaaaaattcagaggagaaaaattatgctggttcctgtattgttatttattgtcggtctgctgttcctgatcaagggcggcgactggttcgtggacggtgcttcggcactggcacggcggttccacctgccggagctactcattggcgcaacggtggtgtccatcggcaccaccctgccggaggtcatggtatccaccatgtccgctgtctccggtcatggtgagatcgcctacggcaacgccatcggctcggtcatctgcaactctgccttgatcgccgccatcaccatcgccgtccgtccgggcaaagtagaccccaagactctgcgggtgccggtagccttcttctttgccgcagccgccatctactgcgtggctgcctacgccatgggcgagttcacccgcccgctgggctttgtgatgctggccatgttcgtggcttacatggtggcaaacgtattgcagatgaaaaaagcccctgccgccgccgaagcggaggccgaggctgaaaatgccggggaagagatgtcccttaccaaaacgctggtgctgctggtgctgggcgctgtgctgatcgcactgggcgcaaacctgctggtggataacggcaccctcatcgcacaggcactgggcgtgccggagtcggtcattgcgctgacctttgtggcgctgggcacctctctgccggagctggtcactgccatcacctcgctggtcaagggctgcagcgatctgtcccttggcaatatcgtgggcgcaaacgtgttcaatctggtgctggtcagcggcgtgtccgtcacgctggcacccttcaccgtgccgcagagctccaccttgttcggcatcaattccagccttgtgctggagatcccggtcatgctggctgtcatggcgatcatgacccttcccgcactgaagcgcggcaagctgtcccgtgcgcagggcattatcctgctgtgcatctacgccgccttctgcgccatccagtttaccatgtgacattcccggagatacttcctgaaaaaaggctgctgcacgaaagtgcagcagcctttttgtggttctctggttttcagcccttgcagccctgttcctcccagtcgccgaaatcgttggcatcggcgatcttggtggcgtcgaactttccgctctcgtccttgggggcaacggcggggccggcctccacggggttggcgttcggggcttcggggtcgtaggcggggcgctgggcagcggtctccggctgggtctggggtgcgttctcagcaggggcaggtgcttccggtgcagcttcctcagcggcagtgtcggcagcctttgcttcttccttggcttcggcttccgcgtaggcttcggcggtcttttcgacctcctcggcgtccttttcggcttcctccgggaactcgacctcctccacatggagcgggtctttctggttcaggatcttgtccagcaccacgatggcagcgccggtgacggccacggcagcagccgtgccaagaatacggaacagagttttcataccagaacctccttgttataaagaaacgttaagagaacgttacgacctcttccaggggcttttcggcgggctccaccgacacggcggtcagcaccgggcccttgccccggtagatgttgtggaacttgtaccccaccttggcggtcacccgcacccaagcgcgctgctccagcgccttgtagccatcgtagctgcaggggaagcccacaaactggatgtcctgcacgcagcaggtcatggcaaagcggccgggcacaaagctgtttttgccggcgcggttggtctggcagacctgtgccagaaaacgcaccgtcttgccggtgtacttctggggctcgtcctgacagtccatgtaccagatgccgaaatcgtcatccgggatgtcgatggggtcggcgttgatatcaaagggcagcgggtcggggatatcatcgtaggctacgctgccgtccttgaactcgtaggcgatatcgcacttgcgggaggcctgccgcaccagcttgtgcagctcctgccgggcgtcatcgttgttcacggcttcggcgcggttgaacacgatcagctcgctgcgggcgatcttgtccagcatcaggctgcgcatggagttgtcgcgggcgtaggtcagggcggtggcgccgtcggcggtggcgatgcactggtacaccagccagttctcgggcagggcatccgctaaatcctgcagcagccacataccgttgtactcgatgaccacgcggcctgcgtccgcttccttgcccagctttgcaaggttctgggggttcagctcggacttatcctccagcaccttcacggtcacgccggggaaggcgaacttcttctcgttgtactcctcttcgccctcctcgcagatcagcagcagggtcttgtcgccggagtcaaaattggggtcttcaaaggtctcctgaataaacttggtcttgccgctttccagaaagcccacaaacaggtagaccgggatctcttttgccataataaatggttgctccttttatcaatgataggcgcccccttgggggagctggcaatgccgtcaggcattgactgaaggggtcagcagccgaacagctgggcgatggcggtctcgttcagcttggagccgatgaccaccagcttgccgcccacgtctgcgctgcggctgcgcacttcccactcgccgggcacatagtcgaactccagccagccgtctgcgccgccgtccacgatgcccttgctgcgcaggatcatgccgtaattgccggtatccagctcggtgagggcgtgctccacttcagccttggtgaacttgcgggcagtctccacgccccagctggtgaacacttcatcggcgtggtggtcgtgatgatgatgaccgcagcagcagtggtcgccgtgctcgtggtcatgctcgtgctcctcgtgatcatgatcgtggtcatgctcgtcatggtcatggtgatgatgctcatgctcgtgctcgtcatcatcttcatcatgatcgtggtggtgaccgcagcagcaatggtcatcatgatcgtgctcgtcgtggtgatgatgctcgtgctcatcctcatcgtcgtcatcatcgtcatggtcatgatgatggccgcagctgcacacaccgttctcatcgtagtgatgatggtgatgctcgtgctcttcttcctcgtcctcgtgggcgtgctcctcgttggccttggcagccatggcgatcagctcggccttgaagtcgtccttggtggacatggctttcaagatctgctcaccggtcaggtgatcccacgcggtggtcacgatggtggcagtggggttcttttcccgcagcattgccacggcagcggcgatcttttcctcgctggcggtctgggtgcggctgagcaggatgcagcttgcgtggctgatctggtcatcgtagaactcgccgaagttcttcatatacatcttgaccttgttcacatcggccacggtgacaaagctgttcagctgcacgtccagatgctctgccacgccctccacggcgcgggtcacatcgctcagcttgccaacgccggacggctcgatgacgatgcggtcggggtggtactgctccaccacctgctgcagagcggtgcggaaatcgcccaccagagagcagcagatgcagccggcgttcagctcgttgatctggatgccgctttccttcaaaaagccgccgtcaatgccgatctcgccgaactcgttctcgatcagcaccacctgctggcctgcaaaggcctcggtgatcagttttttgatcagagtggttttgccggcgccaaggaagccggagaagatatcgattttagtcatgttccaaatgcctctttctttttatcgcaatattcgcaattgttagcgcaaagggccgcagagtgctgacccataaaaatactacacctctattataacaagtctgtcaatgggaaaccggcctttttcaagaaaaatttgtaactttttttgcaaattgacggcgttttaccccctcaggcacggctttgccgtgccagattcccccttttgtcgctacgcgacagagtggggaacgggtggctgcgaccagcgggagcagacggaaggggtgctccctcccggcagcgtcctcgccctctccgtcattgctgacgcaatgccacctctcccaaagggagaggctctggcgaaaccgcacactttgcagttcaaccggaaactataccgccatgccaagggctctccctttgggagagctgtcaccgaaggtgactgagagggcgaggatgctgcccgcggagcgcattccaaatcgtccccgcattgcattcttccccgcagaatgatacaatagcagcagcaaaccatcgccgccggacgtttttccggcaaatgacagaaagagggcttttgttatgagtatgaacacagttcccgagcgtctggctgcgctgcgtgccgctatgcaggcaaacggcgtggacgtctatctgatcccggtgggcgacccgcattccagcgagtatctgcccgaccactacacctccctgacctacttttccggcttccacggtgagaactccaactttgtggtcaccatgaccgagagcgccgtctgggcagacggccggtactttgtgcaggcagagaaagagatcgccggcaccgagatccagctgatgcgcatgggcgagccgggcgtgcccaccgccgaggaatactgcggcaaggtgctgcccgagggcggcacgctgggtctgtgcggtctgaccgccaactgtgcgctggtcaacaacctgaaaaaagagctggagtccaagcacggcagcatcaagaccctgttcctggaggacgagctgtgggtggagggacgccctgcccgcccggctaccccggcatggatcctgcccaaggagtacgcaggcttctccccggcagaaaagctggagcagctgcgcggcaagctgaaggagcagggctgcaccgctcagctggtgggcaagctggataatctggcttggcttttgaacctgcgcgccatggatatcgagtgcaccccctacgccatggcctactgctatgttacccccagccgcgccgtgctgttcatcaatcaggcgcgggtcaccccggaggcaaaggcagaactggaagccaacggcgtgacgctggccgactacgacagcattctggacgtgatggccgccgagaccgagccgcagaccgtgctggcggaaagcgctactgtgaactacgccgtgtatcaggtgttggaaaacaaccccgccctgaccgtgaaggacgccgccgaccccctgcttgccatgaagggcgtgaagaacgaggtggagctggcgcacctgcgcgagtcccatctgcgggacgccgttgccatggtgcggttccagatcgagctggagaaccgtctggcttccggcgaacagctgactgagctgaccgtggacgagatcttgcacaagtaccgcagcgcggacgacaagttccttgtggaaagctttggtaccattgcagcctacggcggcaacgcagccatgatgcactaccacgccaccccggaggatcacgccgtcttgcagcgcaagggctttttgctggtggacagcggcgctacctacatggacggcaccaccgacatcacccgcacttacccgctgggcgagctgaccgaggacgagcggctgttctatacttggacgctgcagtgccacatcgacatcgccaaggccgtctggctggattactgcgactgccatatgctggacaccatcgcccgcgagccgctgtggcgtcacctcatcaactaccgctgcggcaccggccacagcgtcagctttgtgggcaacgtccatgagggcccccacgctttgaacggccgcaacaccaccctgatgcgcccgggcatgatcgtcaccgacgagcccggcgtatacgaggccggagaagtgggcatccgcattgaaaacgagatcgagtgctaccacaaggccgacaaccagtacggaaccttccttgccttccgtcccatcacctttgtgcccattgccacctcccccatcgtgcccggcgtgctggacaaggagcagatcgcttggctgaacgactaccaccgcaaggtgttcgagcagctggcaccccgcctgaccgaggacgagcgcgcatggctggctgagaagtgcgccgccatcggctgctaatgctaaaaagaacaaaagtcagctgccgcttgccgtcctgactcttgccgtaaaaatgcaattccgggcagaccgcggtctgcccggaattgcttgatttaagatgatttttccgcaaaggaaaccaaaccatgatctttcacattgcgatctgcagcccggacggggcgctgcgcagcaggctggagcaccagtgcatggagttctttgcccgacgggaggacgcctgcatcgtggagcagctgcaaggcccggatgcgcttttgcagcaggatgccgccgggctgcggtacgagctgtacctcatcgagcttgcggcggtagcccggcccgaaggacttgcggcggcggcagagctgcgccgccggggccgccgcgccccactggcctttgtggcgcgcaccccggcccacgcatacagcgcctaccgggtggacgccatgcagtatctgctgcagccggtgcaccagacggaggtctctgccctgctcaagcgggcggtggagccggaatacggccccacccttaccgtgaccaccgcagacggcgtgcgggcgctggcctatgccgagcttgaatatctggagtgcacccaccatatcgtgcacttccacctgaccaccggggaggatgtggcttccctctcgctgcgggtgcccttttccgccgtggcgcagccgctgttggcagacggacgctttgtgcagccgcaccgctcctatgtggtcaatctggaagcagtgcagctgctttcccccggcgaggtacggatgcgcagcggggcacgcattcccatcccccgcggacgggaaaccgccgtccgggaagccttctgcgcccggttgggataaaagcaaaagccgctgcacagcgtttgtgcggcggctttttttgcttgacgatataattgccttttcacgggaaaggccgtaaaggcaaacggcatttgcggtcgttcaaagcgtcccggctgtaaatggcttattctgtcttatcccggggctttttgcggcgggcgtgctttttgggctttcgccggggctttttgcgggagggctcgggctggacagaggcatcgttcaggcgggacacggcatccagcaaagcgccctgcaggctgtccgagggcacaccgctttccgaaaaggcgaacaggaatttgtagatctggggctgcagctcctcgtacagtccaaggcgggtgtacacctccttgaacagctgaaagacctgcgttttattctccacgatcccgcgcaggtcgatctgggtgtggcagatgcttttggggttctggatatagtgatacccggcatcggggatggaaacgaacacctccgcgtgttcgagataccccatgttgaagagcagatcctccgcccaatggacatcgggcgcaaagccaagctggttttccgcgatgatctcccggcggtagagtttgttccacagcacgccgtagtaaaaggaggcgggctgctgcatcaggcggcgggcgtagtcctcccggctgtaaacgccctgcggcagaaagccgtacttgtgcacctcggtcttgggcgcttccggctcgatgcccagcgattcctgcaatgtttccagcgcgtgcccggtcttgctggagttggaggggatcaccatccagtacggggcgatcactagatccgcgctgtgctgcaaggcggcctgcacaaggttctgggtgtaatcggggtccagaaggtcatcgctgtccgcaaactggatatagtcgccctgcgcaagggcaagcccagcgttccgcgtgcgggaaacgccctcgttctccttatccactaccacgagacggggatcctttgcccggaactgctcgcagatggcaaggctgtcgtccgtagagccatcattcagcacgatgatctccagctcctgataggtctggctgcagatgctttccagacagcgggaaagccccttctgggcgttgtacacgggcacgatgatgctgacgagcggattcgtcatgacagggcctccttttttacgacaggatttgagtattattattatcatactcctgcgccgcccggattacaagagcactgcgctgggaaatattacacctgcgcccagtccagcgcggtccagtccggcaggaactggtcgcatacccggcgcagagcaggggcatcggcggcactggagacgtcctgaatgcctaccagatagaagccggcatcgtgggcagtctgggcggcgtaaatggcgtcctcgcacacagcgcacccggcagggcttgtgccgccaaggcggtgcagcgcctccataaagggggcggggctgcttttgctcatcgcgccccgcgcctcgatgtaaaaatcaaagtattcgtcgatgccaaggcgggtcagcacggcgcggcactggctgctccatgtgttggagcaaatgcacatccgcgcgccctcggcccgcagccgggcaagggtgtcccgcacgccgggcttcagttccaccttttcgtacaactgggcgatcacctcgcgcattacgtccagatagccgttcctgtccagcggcagcgcatattcccggataaggtactgtgcgccgtcctccatgcccatggtcagcagggtctcgtgcaggtctgccttcggggtgcggccaaagcgcgccagcagcgcctccggggcaccctcccataccaccaccatgctgtcggtcagggtgccgtccatatcaaagatccattgtttgcagtgcatactttcctcctgttgtgcgcccctccgggccgcagtgatacacgtctctggctagtatagcacgaaactttcacaggaaaaaggcatcatccccgaaaaaacgggagaattttacctaaaagtatggtataattataacaatgttggaaataccgggaacgtgcacgggagggtttgatatggaacgcagagatcccacgcaaaaggcgctggtgctggcaggcggcggcgcgcggggcagctatcaggtaggcgtctggcgggctttgatggagctggactggcacccgcagatcattaccggtaccagcgtgggcggcttgaacggtgccatgttcgtgctggatctgtacgagaccgcccgggatatgtggctgaccatccgcagccgggatgtgatggagctgccggaggaaaacgccgacctttccgccctgcatcagtttctgcgccgggtggtaaaggaaggcggcatggacgtgaccccgctggaggagatcgtggagcgggtgctggacgaggacgcgctgcgggcagcgcccatccggttcggcatcgtgacggtggagcagcgcgggctgcgcccccgggagctgacgctggaggatatccccgccgggcaggtgcgggactacctgatggcttcggcggcctgcttccccgcattgcgggcgcggcagatcgacggggtaaagtttttggacggcgggtacagcgataatatgcccaccggtcttgccaagaccatgggcgcagaggagctggtctgtgtggaccttgagggcgtgggcatcacccgccccaacctgaccggcctgcccaccaccatgatccgcagctactgggagctgggcgatatcctacacttcgaccccgacaccgccaagcgcaacatggagctgggctactacgacaccctgcgtgcctttggacgcatccggggctgcgcctacgcggtggacagcggtgcggacagcagcgccgatgccgaagccttccgtgccgcctttgacgcggtgcagaaggaggtgcgggagaagtaccccgtcaccctgaccgcagatgccgctttgctgctggcacggatgaaggacgtgcagcttgccccgctggaagccgccgccgaggacgccggggtggaccccacccatttctacaccacccggacgctggcccaggcgtttctggcggcgtgtgataaagaccgcatggaaagctttgccccgctgttcacgggcagcagcaccgccgggcaggcggcgctggccgcgttgctgcccaatacattcttacaggcgctggtgtggcgcactttgaccgcatcggctttgccggaggtgacagaagatgaaggtttataaaggcgtatccgcttccccggggttggtgctgggacaggtgagccggctggaacatcatgtggagaccttcagccacgggcctttcaacccggagcgggagctgcggctgctggcaaacgccgtgcacacagcgcagaatgagctggactccatggcggagcgcgccgcccccaccgagcaggccatctttttgttccagagcatgatgctggacgacgagggcatgatgaacgaggtgcgtttttgcatcaatgcgggcatcagcgcttcggcggcgatgcatcaggtggggcagcgctacgccgaccagcttgccaacatgaaggataacccctatatgcagctgcgcagcgtggatattctggacgccacccgccgggtgatcaatatcctgaccaaccgcccccgggtgtggctggcgctggatcatccggtgatccttgccgccgaccggctgatgcccaccgacctgttcagcgtgccctccggcatgatcctgggcgtcatcaccgcagagggcagcggccagagccatgccgccatcattgcccgggcaatgaacatcccgggcatcgtgcaggtgggcaaggattttctggacgactgcgacggacgcaccgtcattctggatgcaaccaacggcaactgcatccttgacccggacgccgtcgcccgccagcaggcagaagccagcatctgtcagctccagcgcgaggacgcggagatgaagcagctgcacagcctgccggatgagacaagggacggcgaaccctttgagctgctggccaactgcttcggcccggaggatatcgacaccgccatgcagtccggtgccaagggcgttgggctgctgcgcagcggctacatgatgctgcccgggcgcattctggacgagcaggaacagtatttcttctactgctcctgtctggcagccgcaaacggctgtccggtgaccgtgcgcaccttcgactttggctctgaccgcaccgtggccgatgccaatcaggggccgcagtcctctaaactcggcctgcgcggcatccgcaacagcctgcgccagccccagcagttccagacccagatctgcgctttgctgcgcgccgccgcgcgcgggccgctgcgggtgatgttccccatggtgaccgaggtggaggactgggacgccgccatgagcattgtggagcactgccgccagagcctgcgggagcggggcgtgccctttaacgaaaacacccagttcggcgtgatgctgagcatccccgccgcctgcctgaccgtggaggactttatagcccacggctgcgattttctggtcatcggcaccaacgacctgacccagtacacccacgccgccgaccgggagcttgccagcgcggagcactactaccgccccgccagcccagccatgaaaaagctgatcaccatggtgatggatgccgcgggtgcgcaccacgtcccggtgaccatctgcggccttgccgtgggcaaccccgccaacacggcgcagtacctgcaccttggtctgcgcagcttctcggtaagcccccagaacctgctcaaggtaaagcgagccctgctggacaccgatgcccacccggatgcaggggaaaacggctaaaagcactttacaaagcgtaatataatacaaaataataagaggctgttgcacaaaaccctgtgcagcagcctttttcgccatacaaacatttttgttgtaacgaacaaaaaagtatgctacaataaaaataccgcctgaaaaggcggtagactaggtgttgcctgcattgcaggtggtcatgcttccgtacccggctcgcaaaactcgttcttcggaatgaatcaggcacaacgccgggaaaggaacttttttgagaatttgtgatcttcccggagcctgacggcaaaggggggatgccctatgacgctgctggaaaccttggccttggcaacgcttatcgttaccgtggtctacgaaacggttgacgttacgttaaaagttttacagtacatcgagagcaagcaaaacaaaaaagattgaccgccacagttttcccgactcaaacggccaatcttttctgattgtctagggtatggaagctgaccgttgccgggcagcaccttttctgttctcagtataatcattccgggcgtatttgtcaagcagatacgtccttttttatgtttactccagattccccgtcagggtcatgacggcggagagcaccgccagcggggcggtctcgcagcggaggatgcgggggccaagacccaccgtttttgccccggccttggcagccatttcggcttcctcggcggcaaagccgccctctgcgccggtaacgatggcaaggcgcagcttctgcccgtcggcgggctttgcatctgccagcagctggcgcaggggtgcgccgccgcactcgtagcagaacagcaccagatcgtactggtcaaagctgcggcacaccgccccaaagttcggcagcggcagggctacgtccggcagaacgccccggccgcactgcttggcggcttccagcgcaatgcggttgtagcgctcgttcttctgctcctcttttttgggggcggccacgcagtagcggctgaaaaagggcacgatgtgggcagcgcccagctcgaccccgtgcttgatgatctgttccagcttatcctgcttggggtagcccgccagcaaagttacctccacggtaggctcggcggcgctggggtagcccggctctacggcaaagtctaccctgtcctctccaaagccggtgatggtggcggtgtactccacggcgctgccatcgcagaggatgacggtatcccccggctttgcccgcatcacccgggcaaggtgatgggcatccgcaccccgcagggtggcggtgccgtcagagatctcggtggtaaagtagcggtgcggcatactgtgcgctccttctcataatgtatggatatcaggcctttttgcagacgatgcactcccagccgcgcttttccttcacttccacaatggcaagcccagccttttccagcccggcgatcacctcgtccttgcggctgtcgatgatgccgctggcaataaaggtggcaccctcggccatcaggccgggcacggcgggtgcaaggctgaggatggcgtttgccacgatgttggcggtgatgatatcataggtgccgctggctttatcggacaggtcgcccaccagcacggtgagcttatcctgcacgccgttcagggctgcgttctccccggcggtgcgcaccgccacggggtcgatgtccacgccctcggcgctggcggcacccagcttgagggcggcaatggcaaggatgccgctgccggtgccgatatccagcacccgctcaccgccgcgcacctgctcgtccagcgcttcaaggcaaaggctggtggtctcgtgaccgccggtgccgaaggcaaggccggggtcaaggatcagcttgacccggtcggtgtcgtactgctgccacgagggcaccacagccagacggctgccgatctccatggggtggtagtatttgcgccagccgttctgccagtcctcctgctccacgccctcagtctccacggtgtaggggatgccggcggcttccatgcgggcggcgataagcgccagcgtttccacctgagaagcgcccggctccagatacagatggatgatcacggtatcccggggcttgtccagcagctcctgctcgatcagatccacgtgggcgatctcggccacctgctgctcgatgtcgctgtaatcctcgatgtagatgccgccctcggcgatcagggtagcaacggcttcggcgttttcggcatcagccttggccacagtcaggcggatatcggtccattccataaggcattctccttttacgttgtatccatgccgcccggcggggcagatggaaaaaagttctcttatctgtatagtacccgattctgcgctgggatgcaagcatttggacaaaatagacataaaaagaaaagatttttcagcacttaaatcagaacgcgtgcagaaaaaacaaaaaatactgacaagcgtaccgttaaacaaggacttttggtgcattttaatagaaaaaagaaaaaaccactttctttttttgcaaaaatatgttactattctgttacggaactatggacagcctgcaaccagagactgtctgtaaacacaaacattctttaaggaggaatgtgtcttatgatgaagtatctccagaaactgggcaaagctctgatgcttcccgtcgctgtgctgccgatctgcggcatcctgatgggtcttggttatgccctcgctccgggcgttatgggcgttcccggtgcaccgacttccggcgcagcttacaccgtcggcttcctgctggtcaaggcaggcggcgctctgatcgataacatggcatggctgttcgccattggtgccgctgtcggccttgctgacaacgacggtaccgcaggtctggccggtctggtcagctacctgatgatgcagcagctgctgagccccggcgtggtcggcatggtgcgcaccctggaagagggcaccgctacctacattgccttccagaaggtcgccggcaactccttcatcggcattctggccgctgttgtgggtgctgcctgctacaacaagttcaagaatacccagctgcctgactggctggcattcttctccggcaagcgcttcgttgcgatcgctaccggtctgatctccattctggtgtccgttgttctgctgttcgtctggcccatcatcttcgacgcactggtcgctctgggcaagggcatcgctggcatggacggcatcggcgccggcatctacgccttcctgaaccgtctgctcatccccaccggcctgcaccacgctctgaacaacgtgttctggttcgataccatcggtctgggcgacctgagccacttctgggctggcgagacttccgctgatgtggactggagccttggtatgtatatgtccggcttcttcccctgcatgatgttcggtatcatgggcgctgctctggctatggtcaagaccgctaagaacaagaaggccgctattggtctggttctgtccgctgcaatctgcgcattcgtctgcggcgttaccgagcccttcgagttcggcttcatgttcctgtgcttcccgctgtacgttgtgtactccgctctgtacggcatcttcaccatcatcacctactacaccggtttccgtgctggcttctgcttctccgcaggtgctaccgacctgatcttctctgcatccctgcccgcagctgctaagacctggatgatcattcctctgggcatcgcagcattcctggtgttctacttcgtgttctacttcgccatcaccaagttcgacctgaagacccccggccgtgaggatgacgacgaggaagctgagaagaaggtcgttctggccaacaacaactacaccgaagtcgcttctgctgttctggctgctatcggcggcaaggagaacgtgaaggacgttggttactgcgcaacccgtctgcgttttgaggtgaaggataacgccaaggtcgacgagaaggctgtcaaggctgccggtgctgccggtgttatccgtcccagcaagaacgcttgccaggtcatcatcggcaccaaggtgcagttcgtgtacgacgagctgaagaagatgctgtgatcctgcacttctgaaaagaatgaactgcaaaagtctggttgattttgcagtatgaaccgggccgccgggggcggggtgcacagcgccccctcccggcggctcgttctttttgcacagcggtacaatgttcacacaaaaggacttttgtaaaaacacccggcgtgctatactgggtgaaaagcaagaagctgttttcgtaagcggggtgcgccgaacgacgaggatttttgtccgcagacaaggcgattttccgcagcaatccttggtggattgcaaaggaaagcaacgcagtatgcgagcaaaaagaccgttcgggcggtgtgcaatgcttatgaaaacggcttcaaggaaagaacgaggtgttttgtatgatccttcagaatgcactggtctataccccgcgccacacctttgagcgcggcaccatcatcatccgcgatggccgcatcgtgccctttgccgccccggaagagggcgaagaggtgctggacgccgaggggctgtacgccctgccgggccttgtggatatccacttccacggggcaatgggcaaggatttctgcgatggcaccgaggaggccatccagacgctggcggattttgaggccagcaagggcgtgctggccatctgccccgccaccatgacctaccccgaggagatcctgaacaaggtaatggacgccgctgccgcccataaaaacggcaagggtgccgaccttgtgggcatcaatatggagggccccttcatcagccccaaaaaggtgggcgcacagaacccggagtatgtgcagggcgcagacgccgccatgttccgccgtttgcagaagcgtgcgggcggtctgatcaagctggtggacgttgcacccgaagagccgggcaatctggactttatcaaggagtgccataacgaggtgcgcatctccatcgcccacacctgcaccgactacgacaccgccgtcaaggcctttgaagccggtgccacccacatgacccacttgtacaatgccatgcccggcatcacccaccgtgcgcccggccctatcattgcagccatggagcacgatgccgaggtggagctcatcaccgataacgtgcatattcaccccgccatggtgcggttcaccttcaacaccttcggggacgaccgcgtctgcctgatcgcggacagcgccatgtcctgcggcctgccggacggtcagtacagtctgggcggacaggctatcacggtcaagggaccccgcgccaccctgaccgagcacccggacaccattgcgggcagcaacacctgtctgtacgactgcatgaagcgcgccgtgctggagatgaacgtgccgctggaaagcgccgtccgcgccgccagcgagacccccgccaagagcattggcgtggacaacgactacggcagccttgccgccggacgctacggcaacgtgatccttgcggacaaggagctgaacatcaaggctgtcatccagaaaggaaaccggatcgtatgagagagcctgcgtttatctggcggctgctcaccggcccggagctgaccgatgtgtatctgaacgagatgcgccgggactttcctgccggggagctgaagcccctgagcatgatcctgaacagcgaagcggatggcactgcccacacatggggcgtgtttgacggggacacccttgccgcctatctgctgatggtgcgtcccgagggctgccggatgagccagctggattattttgccgtagtgcccgcctaccgcgcccacggcattggggcgcagctgctggcgcagctgcccgcccacgaggacaccgccgaggccattttaattgaagccgagatgccggaaaaggccgaggacgcagccatggcagtgcggcggctgggcttttacgcccgctgcggcgcgtgggacacccactacaccgagcatctttttgacgcgtggttccgcattctggtgctggactgcccgggctgcgcgccccttgccccggagactgcagtggaagccctgaccgactgctaccgccgcaccatcagccctacccagtggcaaaagcacgtgcagttctttgccccggatggcagcgtgtgcggctgagggcaaaacgcacacaaccataacataaaagaatgcccgcccaccgtggtttcccacaggtgggcgggcattttgcggtctatcgtttgtgcgctgtaaaagcgctcagagggcggcggtctgggggagcaggcggaagagcattacgggaagctcgctgtttgcaaaatccagcgtaaagatgagtttgccgttctttgcttcaaaaggcagctcggtctgcgtgccgtccggggcaatgcgcacaagctttttgccttccagcagtccggcgggcagcgcaagccttacccgaccggtgggctgcgtcaggctgccggcagtctcaaatgccacactcaggtattccccgttcgtccgtgcggtcacatccgccgcagaaaggctgccgctgagcggccatgccgttgcggcgtcgatcttttccagctgcgcggcgttttctgcctgcccgcacacggggcagaaggtcagcgtttcgccttccgcagtgcggaaagtaaacttccggcaatcggtactgccggtgtgcgcgcagccctgccgcagacaaccggcgctctgagagccggttccgttcggggaccatgcaccgaactggtgtcccagcttatcggtcgggtctgcggtgtagctgtctttgcagcgggagcaggtaaaaacagtatagccgtctgtttcacaggtaggctctacggtaacagcctgataatcatggttcagtgcgggcagctccgcataggtggtatagtcacaacgggaacaggtgtcgtaagcgttccagcccttttccgtgcaggtaggggcttttgcatcgtgattcaccagattatggttcagtgcgggctgctctgcataggtggtatagtcacaacgagagcaggtttcgtaagcgtcccagccgatttccgtgcaggtaggggcttttgctgcgtgctgcttcaaatcatgctgtgcgggcagttctttgcgggtggtatagttgcagtttttgcaggcttcgtaagcatcccagcccttttccgtacaggtggcggcttttgctgcgtgctgcaccagagcatggttcagcgcgggcagctccgcataggtggtatagtcacagcgggagcaggtatcgtaagcatcccagcccttttccgtacaggtggcggcttttgctgcgtgctgcaccagagcatggttcagcgcgggcagctccgcataggtggtatagtcacagcgggagcaggtatcgtaagcgtcccagcccttttccgtacaggtaggggcttttgctgcgtgctgcttcaaatcatggttcagtacgggcagcaacggagtggcagaatagtcgcagcgggagcaggtttcgtaagcccagcccatttgcgtacaggtgggggcttttatcacgcgctgcctcagatcatgtttcagcgcgggccgctccacataggtggtatggtcacaacgagagcaggtttcgtaagcatcacagccgggttccgtacaagtggggtcttttgctttgtagtataccaaataatgtttcagtgcgggcagttccgcataggtggtatagttgcagcgggagcaggtttcgtaagcgttccagcccttttccgtgcaggtgggggcttttgctgcgtgctgcaccagatcatggttatttgagtctttttcgccgtattccccaccacacacctcacagaccgctttggtggtgcaggttgctttgccaccggtacactttgcagtatcaacttcgcggcagtagttcgtgcagctgcgggtgtgcgtgccgttgccggcggatgaccactcgccccatgcgtgaccgccgtagtaactccctccgcaagtattgcacattcccagagtgtcgcaggtcgcgtagccgccgctgcagcttccagtctcttctgcgttgcagcgcttgcatctgcgggtgtgcgtgccgttgctggcgtagttaggcgtccacgcgccccagtcgtgaccgagaatgccgtatttcgcgccgcatttttcacagattttgcctgtgatgcaggtgggagtttcggtgccgccggagtgcccctcacgcgggtgtccgggaacgaaactcttgccgcaataggtgcactggtaaaggccgtggtgccaattgccgatagcaacatactcgatgaaattgtgaacttgattcttgcctagacatggccattctatttgcgccggaagctccgccgctgcgggcagacaggcagcaaaaagggtgagcagcagaaagagaatggcaactctcgtctttttcatgacttacctccttgtcatcaaaccttgttatcctttcagatcaaactgcacggacagcgatgcaagcacggcatctaccaccttccgcgcctgggcaagcatatcgatctccgccacaaaagcgatgacctgctcgcgctcctgcgcggggacctgcagcgcactcaggctcatgctcagatagcgccgtattttgcgctccagcgtaaagtaggggtcgcaccgccgtgccatgtagccgcgcatcatgccagccgtgcccagctccatctcgtagaaatcgcactcggcgcacccgggcagatacgcgctgaacgccgcctgcagctcggccgtggtgctgcggtggatgatctccgccgtggcggggaaggtgtacgcttccacatagatatcccgcagattctcgctcagctcggtcatcgccagctgcaaagccgtttccaccgcgtagaggtacaccggcgagggggcgtttgccgccagcggccttaccgcgccgaactgcctgctgaacatcatgccgatcagctcggtcagcacaccgtccttggtgcggaaaatattctggaacgacccggcagaaacatctgcttcctttaaaatttctgccaccttggtgttcgtgtagcctttttccagaaaaagccggacacaggcggtcagtatccgccgttttgcttctttgctgtcgtatctgcgcgccattggaaatcatccttttctacaattggtttctaacccaattatatattgattttaaaatcacgtcaagtaaacttttcagggcgtattttgggcaggttgacaaaatttgaacttcccgccggtgtgcaaaagtgtgcagagccccagaaaatgaaaaatcccacgaggaatcttacgattcttcgtgggattttggtgcgctcgagggaactcgaatccctggccctctgattaaaagagcccaccgggcagaacactctgattttagaagtttcgagtttacgtcatttttgtgcaaggcatcgtgattttccgcccggcaatttctgcaccctttgtcgtattttgcaagtcagagtacccattgcatcccttgaaaccgtgcaaaaacagtgcagaaaccgtgcacttattctgggacaaatgaaaaatgatgatttttgatccatgacctgatggcggtttgagtgaccgcaagggtaaatttgatacacggaaagaagaatgcccactcgtctgaggagttctcaggggagcgggcatttctgtataatggcattttgtatatgtcacttgccacttttagcatggaggttgccagtttttgagatgaagttgactcttttagcataaaggttgccatttggggaaagaagtttctgcttttttatatggcaagtttccgcactttccgcattactttccacactttccgtaccccatgagatatgaacacctgctaaactttttcagaggttgctacttttttgaggtatggttgctaaaccttgcgcaaaggatgctacatcttagtccaaggtcgctaaacatagcgcacagaaaatctcgcaataatataattaaacttatgataattcggattatattatttcttgtaaactgcatcttcctgaatcagaatcaggttggagttctctgctgccatttccaccagtcgatctgtaaagccgctcttggagaacagcccgtacacaatttcgtagcccttaaacgccgctgtaagttctttggactgccccttctcctgcaaagcagagtagaccgccacatccacaggtttcgcatggtacttgcactcaccgaggaacagccgtttgtgctggttgtccacagccgcaacatcaatttccgtatcgccctcattatcattgcgccagtaagagccaatgcgtgagggtgcaaagtcgatctgcccctttcggcacagctccgcaaagatattccggcagatgctctcataagcgaaagccacaaatttttgcttgaagtctttgcccatctcatccagcacgatctgctgattatccagttctagctctcccttgaacgggtacacatagcggaaccagaagcggatgaagttgtccgagacataatacaggcttttccgggaacgctctggattcttttcggtgatgggaacgttcttgataacaaaaccaaggtcgatcagtgttttaaggtacggcgtaatagccgaagtgtcctgttccatcgtcatgccgatcttgctcagcttgtggttgccgtccgaaatcgcttttagcacggagaaatagttgatgggcgtctgcacttcctcgttgagcaggaaatcaggttcttcatacaaaaagccatttttcgacagtaccacacgccgaatctgctccaccagcggctcgtccgtctggaaaaactccatatatttcggtacgccgcccgtgatggcatactgctccacagcctgctcaaacgacaggttctgcgccgcatacacatccgtaaattgcagcggcatcagccgaatctgtgccgttctacggccatagagcgggctgtcgtatgccagagcgtgttttttcatcatgctgatgagggaaccgcagagaatcagcatcacgttatggtctttcagcacttcatcccatgcgttttgcaagatggacgggaaatccgggttcgtcttgaccagatacggaaattcatcaatgacaagcacctttttctcgtccgggtggtcgtctgctaccacttggaataaatccagccagtcggtgaatgtgactttgctgagcatgggattcttcgtggtacgggaaagcaccccggcaaaccgcttcatgctctgggcttcactttctgtggttgccaaaaagtagaacgcgcgtttatctttgataaactctttgatcagcgttgtttttccaacgcgccgcctgccgtaaatcaccacaaagccgctgccgtgctctagctccgcattcagcgttgccagttcggatgttctgccaatgaagtccataccgtgcacctctcgcttaatataatttgaattatgataatttcgattatattatatgctttcttgcagactatgtcaatgtaatgctcgcataaattccaatgcggcatcatatgacaggttgattttacatgtcagttacgatattattaaaatgaactttatgtagcttaaaccataaaaaggagttgagtacattgggatttcttatttctttaaaacgaaaatttcgacaattcaaaaagttttttcgggatcatcagcaggcatttaattttattatcgtgtttctcttcttcgcaattgtcggtccattaggtattaatcagattttttatcgcccaccagtgttccctatcttcaaggttagctgggaaatcggagatgctctatcctattacggtgtactggtcgctgcagttgcgaccattgttggcgtatatgtttcaataggtgctgcgcaaagaagctaccatgaagatgaaataaatagagttaaaccatatattgccttaacgggttatcgtacagcttgtaaagtccaactgtttagcaacaacccggacattgccgcttctaatgctgataatcagtcttcatatgaagagtatatccttgacaaagtccatgttgtcattgaaaatcaacagattttattcaaacgagaactatctgatgagcaaaaaaagattgtagaaacctatgggctgtatctaagagatacgggagatcacaagtatgttttagatagtggccattatatttatcttccactaaagattgaaaatgttggaagtggaacagccaccaatatgtttatcggattttaccaagaaaacacaaaacatcgaggtgttaatctctatacattcaaagttggacaagttgcctattgtgcaattttctctaacgattctgaagagacgctctttggtaagtatgttttaaatttgacttatggagatattttgggaaatcattattctcaaaagtaccctatagtcattggtaaagaaggaacacattattgtattacaatcgactggagtggagtacaaacctccgatgaagagaaaaaaattcatacatactgaatagataacacacagcccactctccataaaggcgtagacgagtgggctgtactttccttataaataaagctttcttttcgattcacattgaccctatctagcttgtggtgtccgtgcactccatcatctgggctctacagctggctgacgcttcaatgtcaacgatagccaatcttgttactatcctctaaagatagagtacaactttactactttgttgcaaggcatttttctctagccttgttgcccaccgaatcaagtcgtggtatagtaataattggagtagtttaaccttaaagatcgttgcggcataaaacttccgataatattgattatctggaagttttcgggattctataatgcaggaggttgtctgtatggcggtgctttcaaagagtcaaatgtccgaagaagatattaagttccattacatcacacccgcaattacagcaaaatgggataagcaacatatcacgctggaaacaaaaattacggatggccgtatcaacctcaagggtaacattgtggcccgtgaaaagccgaaacgtgcagactatgtgctttacctgagcgcgaataatccgattgccattgttgaagcaaaagacaacaatcatacggtttcccatggattgcagcaggccatgacctatgcgcagatgttggatgttccgtttgcctttagctcaaatggggatggctttgcagaacatgacttcttgacgggcaaagaacgcacctttggccttgacgaattcccaacagaaaaagagctggttgagcggtacaaagcaggtgcaaacgatggagctggtttgacagatgtgcaggagaaattaattgcacagccatattacagcagccaaaacacttacccaccgcgctattaccagcgcattgccatcaaccgcacgttggacgcgattgcaagaggacaaaatcggcttttactggtaatggcaactggtacaggtaaaacttatacggcatttcaaattgtatatcgtctgctcaaaagcggcttaaagaaaaagattctctatcttgcggaccggaacaatcttgttgaccagtctatccaacaggactttgcgccgctggaaaaggtcattcataaggtgaatttttctaaggacgaccctcgcacgattacttcttatgaggtctatttttctctctatcagcagctcgctggaaagaacgaagaacaagacgagaacgctgaaaatgcactcgataagctgtcacagctctttagcccggatttctttgacctgattattgtcgatgagtgtcaccgtggctcggcgaagaaagaaagcaactggcgcaaaattctggaatattttgcttctgctacgcaaatcggcatgaccgctacgcctaaagaaaccaaatatgtttccaacatcgactactttggtgaacccatctatacttacagtctgaaagaaggaatcgaggacggttttcttgcaccttttaaggtaatcaatgttatgactgatattggtgagggatggcgtccacgcaagggccagcgcgatatttacggaaacgaaatcgaagatcgcatttatacaaatagcgattacgactacaacattattatagaggatcgtatcaatcaagttgctgctgaaatcacgcggtacttgaaaagtaccgaccgtatggcaaaaaccattgtgttctgcccaacagaagaggcagcagaacgtatgcggatggcattggcaaaccagaacgctgacatggtgaagcagaatcccgattatgttgtccgcattacaggcagcgatacttatggaaagagtaagctggattattttatctccgttggctcaaaatatcctgttattgcgactacctccaagctgctctccacgggttcggattgcaagatgacaaagctgattgttttggatgaaatgattggttctatgactgagtttaagcagatcattggccgtggaacccgtctgcgcgaaaaagaaggcaagacccattttgttgtgatggacttccgaaatgtgagccgcctttttgccgacccggattgggatggcccgattgaaatgaacgaagacttcgatcctgaaaaagaaaaggataagcccgtaccgaaaaaagacaccggaaactctgatcctcctgttcggccagaccccaagaaacccaaaccaatcgttgataaagatggctgccgggtggagatcatctacaaaacggtttccgtttatgatgcaggcggaaagcttctccggcaggaaagcattattgactacacaaaagagaatatccgtggctcgtacgcttcgctggacaattttatccgtcaatggtctgctgaagaaaagaaagaaaaaatccgggagcttcttttggagcatggtattgaccttgaagcactaaaggccgaccagaacatgacagatgtggacgactttgactttatctgccatgttgcgtttgataaaaagcctttgacgcgcagagaacgagcagaaaatgtcaaaaaacgcgactttctaagcaaatacagcggtgcagcaagagatgttctggaagcacttctggacaagtatatgaatactggcatttatgagattgagaaaacggaaattctgcggcttgacccgttcctgaaaatgggcaagcctcaaaagattgcctcttactttggcgggaaagacgggtatctgaaagctgttaaggaactggaacaggcaatctatgaaggagaaattgcataacaatgggaaatttatcgaattttgtgaagcgtgtccgcgatattatgcggaacgatgcaggtatcaacggtgatgcgcagcgcattgagcaaattgcatggatgctctttttgaaagtgtacgatgccaaagaggatgactgggagtggaacgaaaaagattatcagtcgattattcctgaaccctgccgctggcgtagctgggcgcacgatgaaaatggtaagggcataacgggcgacacactgttggaatttgtcaacaatacgctgttccccaccttgaaaaagttacctgtggacgcttctacgcccatcaaaaaagcaatcgtgcagactacctttgcagatgccaacaactatatgaaagatggtgttttgctccgacaagttatcaatgtgatcgatgagcttgacctgagtgattatgcagaaagtcatgcgtttggggaaatttacgaaactattctaaaagagctgcaaagtgctggctctgcaggtgaattttatacgccgcgcgccgtaactgattttatggcgcagatgatcaacccacaaattggggagaagatggccgattttgcctgtggcacaggtggttttatcaccagttggctgaaagctctgcataaaaatgtcaagacaacagaggatgaagccctgtatgcaaactccatatatggcattgaaaagaagcagttcccatatatgctgtgcatcaccaatatgctgctgcatgacttggatgtgccgcaggtgttccacgataacacgttgcttcgggatgttctggactataccgaggacgatcaggtagatgttatcttgatgaaccctccctatggtggttctgagaaaaacgatgttaaaaatcactttccggctgaccttgccagcagcgaaacagcagacctgttcatgtccgtcattatgtatcgactgaaagaaaatggccgcgcagcagtcattctgccggatggttttttgttcggcacagacaatgccaaagtagcaatcaagacgaagctgttctccgagttcaatgtccataccatcatccgtatgccgggcagtgtgttctccccatatacatcgattacgaccaacattttgttctttgaccataccggcccaacaaaggagacatggttctatcgtctggatatgccggaaggctacaagcatttcagcaagaccaagcccatgaagttggaacactttgctcctgcagtagaatggtggaatgaccgcaaagaaattcagctggacgggtttgacaaggccaaaaagtataccgtgcaggagatcaaagaccgcaactataatattgacttgtgtggctatccgcatgaggaagaggaaatcttaccgcccaaggagctgattcagcagtatcaggagaagcgcgccagcctgaacgcagacattgaccgaatccttgctcagatcacggagattctgggcattgaccttgatgcacaggactgagccacatagataaggaagaaaaaatgacaggacagcaactgaaaaattccattctgcaaatggcagtgcagggcaaacttgttccgcaagaccccaatgacgagcctgcttctgtgctgctggaacgcattcgtgcagaaaaagaacagcttatcaaagagggcaaaatcaaaaaggaaaagaatccgtctgtgattttccgtggagccgataatttgccttatgagaaggtcggcaaaaatgagcctgtctgcattgcagatgaagtgccgtttgacatcccggagagctgggagtgggttactttaaaacagatagctgttaccgcactaggtaaaacactagataaatcaaaaaacattggtgaatatcgcccgtatctatgcagcatcaatgtttattggacaggtattgatttatcaaccgtaaaacaggctcgttttgaagattctgaattatcgaagtaccagctgaacaagggagacttgcttatctgtgaaggcggtgatgttggccgttctgctgtatgggatagagatgaagaaatgtattatcagaatgcacttcatcgtgtccgcttttacggtaatatcgagccacgcttcttccagttactgatggaaagctataagggcgcaaaaatattggacaattatagcaaaggaatgactataaaacatctcgttcagaattcacttaactctatttactttcctttgccgccacttgctgaacaaaggcgcatcgtagaaaaaatcaaacagcttacgccgtatcttaaaaagtatggttcagttgaaactatactgtcaaatctgaatttggctttcccggatgacttgaagaaatcaattcttcaatatgcagtacaaggcaagttggttcctcaagatcctgctgacgaaccagcatccgttctgttggagcgtattcgcacagaaaaagaacagcttgtcaaagagggcaaaatcaaacgtgacaagcatgaatcggtcattttcagacgagataattcttattacgaaatctctggtaaagaagaagtttgcattgatgatgaaatcccatttgaaattccagattcatgggtatgggttcgcttgggaacggcattgaaccaagcgtcaacaggaccatttggaagtatggttcacaaagaagattatgttgaatctggaattccaatagtcaaccctgctaacattattcacggtaatatttcttccgaaaaaatcaagaaagtttcaaatgcgactgccaatcgtttatcgagctataaattaaaggcatttgatattattattggtagacgtggtgaaatgggaagaagtgcagttgtagagagccatcaagaaggatggctttgcggcacaggctgcttctttgtcacaccatcgaaattattgctgccacagtatcttgtctttttacttaacagcccatttgttaaagctgccttgacagaaaattctgttggaacaactatgaataatttaaatcataacatcctacagagtctactaatccccgttccacccataaatgaacagaagaaaataatgacgaattatcagaaaagcacagccattcttgatgggtgagttcttattatgagaaggttgatgaaattgaacgctgcatcgatgatgaaataccgtttgagattccagaaaactgggagtgggtgcgcttcttttccatagtggagatagcaacaaatcttgtctctccagaacgatatttcgattatatgcatattgctcctgacaatattgaaaaatcaacaggaaccctcttggaatgtcgaacagttgcgcaggataaagtctcaagtcccaatcatctatttttcaagggacagattctttactctaaaatccgcccacttttgcgcaaggctgtaattgctccatttgatggattgtgtagcgcagatatgtacccactaaagactccactaaacaaagaatacctattgaggtatattttatcagactcgttcaatgcacaggtagcaactgcaatgtcaagtcgagttaaaatgcccaaaataaatcaagctgagttgagcaaagtgttgattcctgtgccgccaattcaggaacaagagcgcatcgtaaataaaatcaaagaattatatatggccttggtgtgagattgtataaaatcatggtgaaaggaggtctttcactatgattgaagaatttgaaagacacttgagaggaacaaatctctcagaaaacactgtaacatcctatttgtttgctgtgcggcagtttggggaacggcatgatgccgtcaccaaacgcaatttgaaagagcacaaagcctggctgattgagcagtacaagcccaaaacagttaatctacgaatccgcgctatcaactgctacctcgaaagcatcggaaaggattcatggaaattgtcatccgtcaaggtgcagcagaaagccttccttgaaaatgtcattagcgaagcagactacatctacttcaaaaactgcctgaagcgcgatgacaatatgctttggtattttgtcattcgctttttggctgccacgggtgcacgtgtcagcgagctggtgcaaatcaaagttgaacacattaggcttggacacctcgacctttattctaaaggtggaaagctgcgccgcatctacattcctaaatcattgcaggatgaagccattgtctggttggaagaaaaacagcaggacagcggctttatctttttgaatcgtttcggcgaacgaatcaccacaagaggtatttctggacagctgaaaaagctggcgataaagtatggcattgatcctgcggtggtttatccccactctttccggcatcggtttgcaaaaagctttttggatcggtgcagcgacattgcattccttgcagacttgatgggtcatgaaagtattgaaacgacgcgaatttatttgcgcaaaactgcaaccgaacagagaactttgatagataatatcgtagactggtaaaaatgaggacatacattcttatgatacggaatgtatgccctttgttttttatagccttgaaatattttggagaatttgcttaacttgagttgaaattttgtactgttctgaaagtggtggcaatggaagaagtagcgtcagaacgctgttacggtcaatccctgggatgaccccttgcccttttgatttaagtaaatcaaaatttgcttgtagaaaaaagcgtatatattccatatccaagatatcatttttctttatcgccataatttgacgcgcaatatgcgctacatcgacattacagataatgctttttccatatccagaacccttgcaaacaagaagtatatctcccttattagcaataatgcgaggagtttcagtccaccgtgttactaaaacttgatttttgctcaaactactggcacctgtgatgtacggtattccatttccgctttcgttatactcttcgggtttgaagtctgttccagatagcaaagtgacaatggttcccattcgcgtccattcccacgaatctggaatctcaaacggtatttcatcatcgatgcagcgttcaatttcatcaaccttctcataataagaattatcccgtctgaaaatgaccgattcatgcttatcacgcttaattcttccggctttgacaagttgttctttttctgcacggatgtgctctaacagaacagatgctggttcgtcagcaggatcttgaggaaccaacttgccttgtactgcatattgtaagatagacttttttagttgcgctgggaaggctgtattatagacttccaatgctacttctttttcatcgtactttgtgactagtggcaatacggatgaaagttttcggataattctacattgttcttcaatgggaggaacagggataaacaaatttgcgataacaagtggctttagttccgtctgattagttgaacctgagcagttcttttcaaaataaggttgatagtaaaccagtacatagtagacgtagtctaaaactagtatcttgttgatacgaatggttgtgacatgagaatctggcacgatcacacagtcattgcttctatcagaatcgtgaaagacaccaactcttcctaaggttccgtttccggttgaattaacaacaatatcaccatcttgcatatattcatcatccgggtattttgcaaatgatttaaagtccaagtgtttggctagcgataaatctatgataccagcttttgtgttacacttctgagcaaacacaagaatgctactattatcagcataggttggagattttcctcgcttgatttctttaacgacaatatcctttagccgcacccactcccagctctccgggatgtcaaacggcacttcatctgcaatgcagacaggctcatttttgccgaccttctcataaggcaaattatcggaaaagcccaagacagtaatctatgcgtatcgcgctatcgacacaaaacggtaaagtggattttatctgctttgccgtttttctttttgccccaaattgtgaaattttcaaaactgtattccaaaacggctctgcggattcctattagtgtaggggatttcaaaatcttttgtaaaacggctttccgctagttctataagtggataatgaacaaaatctatattctaaaattaggcagttcaacaaaatttgaaaatctgtatgccaaacacccattttagaatgttataggtgtagaggactttgaaaaaagtgaaaatttcccgaattttcataagcccccgtttaaaaacaccctgttaagtttgtatagggtgtagggactactttcaaaaacagtcttactcgcatttttgaaagccctcgacttcttacaaaacaacattgtaccttgacaacagcatgatcggctgcaagccactatgctttttcggagaagtgccgccatgatatgagcgcaccaagaagaagccatacgccggaggagatcgggcaggaaccgcttgcaggcagaccgacaccgaagaagaaccgggcaagctggcagagaggacttcacaagtcttgtctgtcaggttgttcggcgcaagagtgcagagatcgcagatctttgcgcgggtcaagggcggcagccttgcccagtggatgtgatgccctgcgtcatatcctactgggtattatctggcgcatagcaggcggcagatttgcagctccgctgcaccgcgttgcccctaccccgcgcacggcgctctctgcgtgaccccagaaaggagagatggtcgctgaaactgacccgacacaatggccgcgccggaaagcacggcacttataacccaaagcacaatgaccgcagttttgaaattgccaacagcgagcatatcgacccggaacgtgttcagcaaaacatctattgggattgctacaacggtatccgttctgccttgcagcccaaagatgtggatagtctggctaacacttttgaagaagttgaaaagctctactacaaactgcattacaccaacttcaccgaaaagcagaatgagcgcaacgccaaaatccggcacacggaacgaaaccgttctcccgaagatctgcttaccagcaagaaaacctgccccgaagaaagcatctatcagcttggaacgctggagagccacgcttcgcccaaagaactttttcaaatcgccacagaatttatggacgagttccatgagcgtttcggcaaacacgttcacattctggattgggccttgcatctggatgaaggtacgccgcacatccacgaacgccatgtgtttgactgtgaaaataagtatggcgagattgctccgcagcaggaaaaggcattggaagcactgggttttgaactgccaaaaccagacaagccccttggacgctacaacaaccgcaagatcacatttgatgcagcctgccgcacgatgctgtttgagattgccaaacgccatggtctggaactggacgaagtgccagaatacggcggacgagcttatctggaaaagcaggattacattctgaaaaagcaaaatgaacggatcgcagaacagaagaaagaactgcaagaacaaagtattcaatacgtcggattgctggaagattgccgtaaccagcgagatgaatatgctgaactattcaatcaagcgataaggcaatctgaagagattttgaaaaacaatgaaaaaattaaaagccaggagaacgaattagaagaactgttttcgcaatgggtagatgtaaacgatttgtttaatgatgtggtaaatggttcttatgaccaagcggtccttgcggtttccgatgttggattaaacaaagcattacaggaagctgtaaatgaaattgaccaacatttggaatggctaatggaaccagaacgaattgcagacttccgcaccagaaaatatgcagaagaacaaatactctgcctgcggaaaaatatcattggggcaatcaagagccttctttcaaaaggaacgcagttcttctatatcccagaagtgaaaaaagcggccatggagcaaatcaaagaagattcccgcccatccgttttgcaaaagctgcagcagcggcaggaagaaatcgcacagcgtgagcagacatgcacaaagccgaagaagcgcagtcatggcatagaactgtaaaggaggaaaatcttcaagaacaacaatttatttgaaatcgtaaagctgaatatcaccacccggcaggccgcagaaacctatggctttcgtccaaaccgcagcagcatgatttgctgtccattccatgcagaccgcaatcccagcatgaaagtggattttcgatttcactgttttggctgtggagcggatggcgatgtaatcgacctcaccgcaaaactgtttcaactttctttgcggcaagcggcgaaaaagctgactgcagattttggactttctgcaacagataattttcaaccacttccctgcaagccggtggaaaaaccgctaagtccgaaagagcaattctacaaaatcctgtgtggctatcgttctctgctggcagattggcgcataacttacgcgccgcagaatccagaagatcccctgcatccttgcttcatcgcaagcatacactacgcagaccgtgtgcagtatctgctggatattcttttgctgggaagtccaaatgaaaaacaacaactactcaacggaaaggaagtgacagcccttggaaaagcaatcgaacgatgcaaggaaaccgaagatgcagcatagtgcacccgcccgaaactgggtgggtgacaacgggaaaatcattgaaccattgttcgcagattactttttgagcctgcaccccatgcgttgttttcaaggcagattgttcacggtggatggcatggtggaagatgaagctccactgaaaaaggaaatctatgagcagattcgctattatgccaccaccagcgtagcgcggcgtattgaacatatcatgcaggccatcaagttggcctgcgcatccgagccgccggagattcagacagaccgcatccatgtccgaaacggcacatactttgtggacggtcactttacccctgaaaaagaatactgcatgaaccgactgcccatctcctatgtgccagaagcaccagcaccgacacgctggctgcaattcttgaacgaactgctatacgaagaagatattccggccttacaagaatacattggctattgcctgctgcctgttaccaaagcgcagaaaatgctgctgatggtcggcaagggcggtgagggaaaatccagaatcgggctgatcctgcgagaattgttcggcagcagtatgtacacaggcaatctacaaaaagtggaaaccaatcgttttgcccgtgcagacttggagtacaagctgcttttggtggacgatgacatgaaaactgaggccctgccgcagaccaacaacatcaagacccttgttgcactggaagataaaatcgacattgagcgcaagggtcagcagagtgtgcagggtacgctgtatgtgcggtttgcctgcttcgggaatggcagcttacacgcactctatgacaagtctaacggtttctatcgccgccagctgttgctcaccactaaggaaaagcccgttggccgggtggatgatccttttctcattgataagatgcggaacgaaaaagagggcatcctgctttgggcattggaggggctgcatcggctgattcggaacaactatcagtttaccatcagcgaacgcaccaccgcgaatctgaaagaagcgatggagcagggcaacaacattctgggctttcttaaatccgagggctactttgaaattcggcagggggccaagtgcaaatccacggatttctataaagtctatgaacgctggtgtctggataacctggaaaagccgctggcagcatcaacctttatccaccatctaaaagataatcagaaaagtctgggcatcgtctacgatgataagtgcatcggcacaaatcggggctttcacaatgtagacgttgacctgtttttacccattgatgttccaagtccgtgggattaaaaaataagaatcaacttgaaaaagccctgctcagcctgctcacagtgtgcaaaaggtgcaggatgagcagagtgagcaggcgattttgaacttacattaaaaatgaaacatggaggttttgcttatgaacaaatctcggcctgttgcgaccgaaactgtgaaatctttgaattatacgaaaaatatcttgcagaccattccgaataacgatacaatggaagtggtcactcaaaccaatgccgtcaagtctccgactgacagcctgaaagccacaacactggtgtacacggtagaggagatcgcacagatactgtccatcagcctgcgctctgcctacaatctgtgcaacagcactaccgaatttcgtgttcttcgggtcggcggaagcatccgcatcccgaaagacagcttcgatgcgtggctccgggcagcttgaaaaaggagataacgtatggcatatattacgaaacgcggcagctcctatggtgtccgctatacttaccaagatgagcagggtaaaaactgcaacaaatgggaaagttttcccacgaaagaggaggcaacaaatcgcaaaaaacaaatcgaacatgaatttgcaaacggaacgtttctgattccgtccaccatcaccgtcaaagagttcttgatggagtggcttcccaagcagtgcaacaagcacaagtgggcaccctgcacctatcaatccaatctgggaaccgttcagaacctcattattccgtacatcggcgatatgcagatgcaaaagcttaagccctaccatctggaggacctgtatgctactcttggcaaaacgccctgcggccagtatcttgagggcaaaaagcaggttctttcggaaaagcagaagcagcggtttctctccggcacgaccatccatgaggtgcatcgcttgctgcggacagcgttccaatatgcggtggagtggggcatcctcatcaaaagccccgttccggtggacagccccaagaaatcgattcaggagcgcgccatctgggacgcggacgagatgtgggccgcacttgccagcatggaggacccgatcctgcatttggctgtccacctcacactggtgggcgcactgcgtgagggcgaagtcgctggcctaaccccggaagatcttgattttgagggagcagacggtacaggcactttccacatcaacaagtgtatgcagcgtgtccaaaaggcatcgctggcaaaaacgggcaaggactgcatcctgcaggaatttgaggacaagcgcgagggcagcaccacaacgctggtgctcaaaaagactaaaacggcatcttccaaccgaaccatcttcatgacgacagtgttgaaagaagaactgaaacactggctaaagcatttggaaatggacgaagccgttgagccggaacgctaccgcaacagtgggatgctcctgcgcttgcccaacggtttggcggtagagccgatcctcatccgcaaaaagttcatcaagtggcaggacgagcacccggagttcactcgcattgtgtttcacggtctgcggcattccagtgccacctaccagctgatgatctccggcggcgatgtgaaagcggtacagggcacaacgggccatgccagcgctaatcttctggtcaacacctatgcacacatccagcaggattcccgtaaaaagctgggtaaaaagttcgaggaaggcttctacaagccgggagcaacacttgtgcaggctgccccggttgaagcagaaccgaccatctccgtgtcggcactgttggaacttctgaaggacgcagaccctgccgtaaaagcgcagcttcgcctggctctgctgacctgaattgcaaaaaatagcacgcattgcagagtaattcacggacttactccatctgacacgaaaaatgcggaccgtgcaaaaaccgtgcagagaccgtgcaaatggcgtataaaaggaaaatcccacgaggaatcttacgattcttcgtgggattttggtgcgctcgagggaactcgaatccctggccctctgattaaaagaatccaaggtgcatcattcgtcaaatttcaaaagctcgaagaagcattatttttatcgcatcatcgcaaaacacgcctttgcacacaccgcattgtttgcatacagtgtaatactttgcaaccgttatccagctattcaggtgtgcaaaaagtgtgcaaaaatgtgcagacgggcaaaacaaagcccaatggacaaatcaaccaccggttttatggcagggtttaggacatccgaacagacaccgtttgatatagaaatgaggttcaccatgaacaaactactttcctgccgcttcaatatggacaccaaccgggtggaagcccggttcgaggatggcaccactcttgccatcgactgcaccgccgtcgaggatgagtatggcaacaccccggcacagcgggcagagctggactggctgctgtataataagcccttggagtacgctcagcttgtgctgggaggagagatggagcactatctctcgctgggatgcgaccacggcaggctggaagattaagtccctataaagaacacggtgcccaccgacctatggtttgccataagctggtagcatcgcttcttatccataagcaactcgctcttttcggctaacgcttttttgtaaatgtttcccttgcagaatctcgccagattctctataataagaaagagctttataaatcttctttcaaatgttgaatctgctcttggaggtgagtgagcccatgaccggcagcggcgcaaataaccgtgatgttaaaaaaatcaaccgcatccgaacgattcgcagcattttttcctgcgaccgaatctcgcagccggagcttgcggcaaaagtcaacaacagctggccgaccgtattgcagaatgtcaaagaactgatagcgatgggactggtgcaggaggtcggcacctttgaatctaccggtgggcgcaaggcgagagcatttgctcccgtgcggaatgccagacttgcggtcggactggagatcacccagaatcatgtcggagcagttctggtcgatctgtccggtaaccttctccactatgagcgtaaaaagcgtctttatgagcggtcggacacctatgcggaaatgcttgccggaatcgtgcaggggctgattgaaaaagagggctgcccggtcgaaaaaatcttgggcgtcggcatttcgctgcccggtattctggacaaagaggggcagacattggtttactctcatgccttgggtctgcggaatgttcctaccgaagaattcagccgttacatcccgttctcctgccggttcatcaacgacgcgaacgctgccggacttgctgaagtgcgcgacctcgaatctccccgcagccttgtctacctttctctgagcaacagtgtcggcggtgcgattctgaccggtggagcgctctatggcggcgaccatcttcgtgccggagagttcgggcacaacacgctcgttcccgatggccgcccctgctactgcggaaaaaagggctgtctggatgcctattgctctgcaaaagtcctctcccagctgaccgacggaaatcttgcactattctttgacgggttgcgctccggcaatgcagctttgcaaacggcatggaatgaatacctttcttaccttgctgtagcagtcaataatctgcgcatgaccttcgactgtgatgtaattgttggcggctacgttggcggctttctggcagagtttggcgaaccgctccgggaaatgctggtcgagcgtaatacgtttgagccggacagttcctacctgaagttcagccgctataggctggaagcctctgcgctgggagccgctctgctccatatcgaagcctttattcagaacctataaaccttcccatcgaggacggcacctgccgtcctcgattttttgcacaattccgccgctttttccttgtgcagttttccgaatccgcgaaaaatggcttgactttggttgtgcggtgtgttaatttgtagtcacattcataaacactttataaaagttaataaacaaataaaaacggaggtcatcttatgaaaggcacaatgaaagttgcagtcatgaacggcatcggcaagatgggctacaccacccgcccgatccccacacccaaagaggacgaggttcttgtcaagctggaatacgttggcatctgcggcagcgatatgcactactatgaaacgggtgcgatcggcaattatgtggtcaagccaccgttcgtgctgggccacgagccgggcggcacagtcgtggaagttggcagtgctgtcaagcatctgaaagttggcgaccgcgttgcgctggagccgggcaagacctgcggtcactgcaagttctgccgtgagggcaaatacaacctctgcccggatgttgtgttcttcgctaccccgccggtagacggtgtttttcaggagtatgtggcacatgaagcaaacctctgcttcaagctgccggacaacgtaagcaccatggaaggtgcgctgatcgagcctctggccgttggtttccacgccgccaatcagggcggtgctcatgccggtcagactgcggtggtcatgggtgcaggctgcattggtctggtctccatgatggcgctgaaagccgagggtgtttcccgtgtttacgttgtagatatcatgcagaagcgtctggataaggctcttgaactgggtgcagacggtgtgatcaacagccgcgaaaaggatgctgtccagacgattctcgacctgaccgatggtctgggctgcgacctcgttatcgagactgctggtacagaaatcactacccgccaggccattgagatggcgcagaagggcgcaaacatcgttctggttggttactccaaatccggcgagatgaccctgcctatgagccttgcactggacaaggaactgaccttcaagaccgtgttccgttatcgccacatttaccccatggcgattgatgccgttgcttccggcaaaatcaatctgaagggcattgtgaccaacatctttgactttgacgacatccagaatgccatggacaagagcatttcggacaaggccaacatcgtcaaagcagtggtgaagattgcggaggaaacgaaggtatgagctttccgcaggttctgaccggtgtggcgcacattggcatcccaacaaatgatctcgacaagaccattgtattttacaagaagctggggtttgtttctgcgctggaaacggtgaacaaagccgccggggagcgcgttgcgtttcttcagcttggcgatctgatgatcgaaacctatgaaaaccatcgtgcggcggaaaaggccggagcaatcgaccatgtagctctggcaacgaccgatatcgaagccgcctttgctgcggcaaaagaggcagggatgcacctgctgcattccagcatccagtcactgccgttctgggaaaacggtgttcgctttttcatggtcgaaggcccgaataaagagagaatagagttctgccagaaattataagcatcgcgtcaagaggagaaaggagcgcgccgtatgagttacacagcagagccgaaacagcaggatacgaacatcaaagtccctctgatcagtaaaatcgcttacggcatgggcgatgtgggctgcaacttcagctggatgttcgttggcaacttcttgatgattttttacaccgatgtctgcggcatcagcatggcggcagtgtccctcctgatgctggtctcccgcttctgggatgccatcaatgaccccgtgatcggttcgctgagcgaccgcacccgttcccgctggggacgctaccgtccatggctgctgttcggcgcaccggcaactgctgtggtgctcgtgctgacgttctgggcgcaccccacatggtcagacagtgctaagagcctgtatatgtacgttacttactgtgtactggttctgggctatacttgcgtgaacatcccttatggtacgctctgcggcaccctgacccagaacatcgaggagcgtgcgaaaatcaacacctctcgctccgtctgtgccatgatcgccatcaatatcatcaacatcatcaccctgcctttgatctctgcttttggcggtgatactgcagcacggggatatcttctggtgaccgtcctttacggcggtatcttcaccctctgtcactggttctgttttgccaaaaccaaagaggtcgtccagcccccggagcggaaaaaagtctcactgaaaaagcagttggatgcagcgcttcagaacaagccctacctgattgcactggcgggtcagttcctgttcggtgtaacgctgtatggccgcaatgccgacctgctctattacttcaaatatgtggaaggcaacgagaatctgtttaccatctactcgatgatcctgatcgttccctccattctgggtgctgcggcattccccttcgtgtttgaaaagctgggcaacaaagggcacaccgcttcccttttcgctgccggaaccggtgtttccctgattgcgctctatttcttcagtgcagtttcttctcccattccgttctatacattcgctgcactgtcccagttcttcttctgcggattcaataccgccatctacgccatcgttcccgactgcgtggagtatggcgagtggaaaaccggtgtccgcaacgatggtttccagtacgcattcgtttcactggggaacaagctgggcatggcgattggcacctctgcgctggctggtgtgctgagtacattgagttttgcccccaatcaggtgcagaatgctgccgtgcagaatgcgatgcactatgcattctcgctgcttcccggtgtgctgtggctgataacagcgattgtcctgttcttctaccgaatcagtaagcgttcgtataaccagattatgtccgaactgaacgctaaaaaaacaggttgaggtgataccatgtttgatgttgtagctttgggagaaagcctgatcgactttaccccgaacggaaccaatgcacagggcatcgaattgtttgcccggaatcccggcggtgcacccgccaatgtccttgccatgaatgcccgtctgggcggcaaaacagcattcatcggaaaagtcggcaaagacggatttggcgattttctccgccagacccttgtggaaagcagcattgatgtgtccggtctggtgattgacgaaaagattcccacgacccttgccttcgtacagcttgacagcaagggagaccgctcctttaccttttaccggaaccccggtgccgatgtgatgctgacttcggcagaagtcaacaggaatctgattgacgatgctgccatcttccatttcggctctgtctctctgacctccgacccgagccgcaccgccacgttggaagctgcgcggtatgcacggcagcagggcaagctggtcagctttgaccccaattaccgtccgcttctgtgggagcatccggcagatgccgttgtccagatgcaggaaggtgtcaagctggcggatcttctgaaagtttccgaggaagaaatgcagcttatcacaaacgaaagcgaccttgcccgcggctcacaagccctgctcgaaatggggccatctcttgtgctggtatcgctgggtgcaaagggtgcttattaccggaacgctgtgggcgcagggcatcttcccacctatgatgtgcctaccgtggacacgacgggtgcaggcgatgctttcatgggcgcaattcactaccagctgcggagaaaagctgcggaggatttgcgtaccctccctgcatttgagcttgaagaaatcgtccgcttcggcaatgcagcgggcagtctgaccacgacaaagggcggcgcaatccctgcaatgccctccatggtggaaattcagaactgcattgcctctatcccactgatgtaaaagaaaggataccctatgacaaaattacagatcagaatgcggcaggtcgatcaggtcaaggactttgtagatttgctgtccaaatatccctatgagatggacttagtctccgggcgatataccattgatgccaaatccctgcttggcatttacagtctcgacctgagcaatccgcttacccttgtgatttattccgattcctgcgaagaactgctgacacagctccatgcgctgctcccagattgcatcgtctgattttctacgcttttctccttcttccatttgcaccgttcaattctggttctccttcaccagaatcgggcggtgttttgatttgtataagtcttactatcactgctttactgcaataaaatttgcaaaaccatcttgacgcgccctgcaatccatgataccctttatcgcaaatcccaccaattttgtagaaaagtacagagcggcgaggatttgttccctatgaagatttttaccgccccgcaacacacccgatctattttgccgccgtttcacccgacaaaatcatcgctgcgctgcgtgggcggtatttttcttttttacaaataaaatcttatgtagttgttcaatcttccaaaatttgtttttagttgttgactacacaaccacaaagtgttattctgtgcttgaaagaagcaggttgtagtgtctgcactgcgtccggctttcttcatattgtaccttgaatcttacataagccgtctgaacgagatacttcgccatgacctcacgctttctgtgggcgagccggacaacgccgctgcaaaacaggggtaggaactgcgttcggtgtgaacggtgaccatgagcagggactttgccttttcacacgttttgctctgcaaaattttcaacgtgcattgcggttcgacttctgaaattttcagtgttgcacggaaagggcgaaagcaagtatcgacctgtggccacaaattttcaatgcttgaaaatgttctgtcacatggtctgtcacttgttggggagtgccttccccaaaccctgctctagcttcgcaccgttggtgcgaatgcggcgtgtcgcattacatagccctctccatcccggagcgggcatttatcattttcacaggaggtcgaatatggctgaaatgaaaagtccgaacgtacacgcaaagaagaaccgcaatgacacgccgcgaaaacgaaagacacacatcatcaaagtccgagtgaccgcagaagaaaaactgcggatcgcatacgcctgcaaagaactccacctcacccagtccgaactcgtccgccgcgttctgtacggcgtgaacgtcaagcacaccgttgtggtggcgcagggcggcgaggatacactggcggcgcttgccgccttgtctgcccagtgcagcaaggtgggcagcaacctcaaccagcttgcacggtacttcaactccggcggcaaagacaccgagcagctccgggcgcaaattctggaggaactgtccgcactcacgaactttcggctgaaagccgaagaaacggttggtgaactgtatggcaaccatcaagcatttgacctcgaaaaactctaactacgccgccgccgaaagctatctcacctttcagcacaacgagtacaccggtctgcccattctggacgagaagggcagacccaagctgcgggattcgtacctgctcgacaaccttgagtgcggcgaatcctcgttcgctatggcctgcctgatcgccaaccgcaagtacggcaagaacggcgggcgggaggacgtgaagacccaccattatatcatcagcttcgacccgaaggacgcagtagagaacggtctgaccatggaacgggcgcaagcccttggcttgcagttctgcaaggacaacttccccggtcatcccgccatcgtctgcacccacccggacggtcacaacagtgcgggaaacatccacgtccacatcgtcatcggcagcttgcgtgtccgcaccgtggaacggcagcccttcatggacaagccgtgcgactgggaagcgggcaagaagcaccgctgcacttctgccatgctccggcacctccgtgtcgctgtcatggaaatgtgcgagcaagccgacctgaaccagatcaatctgctggaagcccaaggtgaccatgtttcggagcgcgagtattgggcgcagcggcgcggacaacgccgcctcgaccatgcaaacgccaagcttgccgccgaagggcagcagcccacccagaccgtctaccagaccgaactggacaaactgcgaaagcagatctacgctgtgctgaacaagaccaccaccttcgaggaattttctgcattgctcatgcaggaacacggcatcgccgtgaaggagagccgaggccggttgagctactgcccacccggccgggcaaagttcatcaccgccaagaaactgagcaagaagctggaaaaggagcaggtgctgaccgccctctcccagaacatccagcttgccgccatcatccagcccagcagcgagaagaagccggataagatcaggaaactggttgacattcaggcgaacgttgctgcgggcaagggcatcggctatgagcgttgggcgaaaaagttcaacctcaaacgctggtcgcagaccttgtgtctcctgcaggagaaaaagctgctcagcgaagatgccttgagccagcgcattgccgaactgaaaactcagcacgacgatgcactggcggtggtcaaagacttggatgcccgcatggtctccctcaaggagctgcgcgggcatcttgtggtctatcggcagtataagcctcttgcacagaagctccagactgtgcggaatcccgccaagttcaaggagcagcatcgtgcagagcttgccgtttacgatgcagcctgcgcctatttcaaggccaatgggttcaggactctgccggacctcaaaaagctggatgccgaatatcagaccctttcctcggagaaaaacgggttctacacccgctacaagaaagcgcagatcgaactgcgtgaactccgcaccgcacaacaaaacgtggaagccttcttccgcaaggaagagcgcaaccacgccgtaccgcagcaggaggtcaaatgaacaacactctgacggatcgatgtgtgaataaacccaacctcacccacgcccctcaccgggcttcgtcctttcgcctgtaccccacccattgggacggagggtagcacctctgtcttttcggacgtaaagaacgccatctcgacccggcaggcagcggagctgtacggcttcgccgtaaaccggaacggtatgatgtgctgccccttccacggggataaacaccccagcatgaaggtggacagccgtttccactgttttgcctgtcaggcagatggcgatgtgatcgattttgtcggcagactttttcaactttctccctacaaggctgtggaaaagttgaaggaggacttcggcatggcacttgccgacggcaaggtgcggcttgctccccgcagaccgcccaccgtccggcagcagctgctggactattaccgctgtctgcagcgttggcgggtccgatatgcaccgcagtcacccacagaagaacttcacccctgctttcttgaagcgataaagaaccttgacatcgttgaatattatctggactgttcggtgctcccggacctgcagaccgaaaacgagctacggaagtattgggagggattgcatgagcgactggaaaaagaggaacgaagattggcgtgatgaggacgaactggaagaagaggaagaatgcgaatgcccttgggtagacagcaagggcaaagtgcgtgaaaccgcttactgccagtaccttttagagaagcaccccatgatgtgcctgaaacagaagctgttcgaccagaacggcgaggtagacgaggacgcactgctctacgaagtccacagcgacctccgtgactttgtgctcgacaaccttgccaagaaggagaagcaggttctggacgcactccgtatcgaaacctatacccctgaatggaaaccccagcttgaccgcatccatctccagaacggaacctactttctggacgagcggggatttgtgccggaaaaggaactctgtctgaaccggctccccgtggaataccagcccgatgcccccacaccgaccaagtggctggaatttctggacggtctgctcatcccggaggacattctgaccttgcaggaatatctcggctatcttctgatcccgtctaccaaggcgcagaagatgctggtcatgaccggcaagggcggcgaaggaaaatcccgcatcggcttgctgctgaagaagctgttcggggaagcctctcactccgaatccatcctccgcatcgaaacgaaccgctttgccagtgcaaatctggagtataagctggtcatggtcgatgacgatctgaacatggtggctttgcccgaaacacggaacatcaagtccatcgtcaccgccgaggaccgtttgtgcatcgagcggaagaataagcaggctgtgcaaggcttgctgtacgttcgtttcatctgcttcggcaatggcaaccttgtggccgctcacgatgacagcgacggcttctggcgcagacagattcttatcacggtgaaagaccgtgaccctgcccgggtggataatcccttcctcatcgaagagttgtccgaggagcgtcccggcatcctgctgtggatgctggaggggttacaccgtctgctggcgaaccgctatcagtttaccatcagcgagcgctccatccagaacctcgaagcagccatggcggacagcgacaacctgacccagttcatgcaggcaacggcgtatgtccgtttcaagcccgacaccgaggaacgctccacctatctctaccgcgcctacaccaagtggtgcgaggataatctggaatcgcctgttccgcaaaagaagttcagccagttcctgctgaaaaatgcggggaagtatggcctgaccttttccaagcacatcgaggggaagtaccgcggcttccggggcgtatgcgtccaccccgcctttgctgcggcataaaacacacgaaaagtgaaaatctcccgccccacgcgccccgaatcagcggtttttacctgttatcgctgttttctccgggtttgtatccgccctttccgggcggatgcagggcggcaaaatgccctttggggcgggagagaaacccggacgcgccctcttggggcgcatccatccagccatgcgccctgtaaaatcaacacagaaaggtacttttgtgtggtttggggcgcatggggcgcgtaaattcaagttctcgcacgttttgggctgctgcttcgggtcaggagcggcaggcccttacatatttaccggcccacagggtgcagctcaaccggagctgcgccgggtctggagaagtgcaaaggagacatgcctatgacgaatgtccgcaaaaattccgccaaactgacccgtgaggacttgaaaatcgcgcccgaatcccctacaatgaaattgtccgaaacccctgccgtagaaccttctgaccagaccagcaaaaccgtccgacacgccccgctcgtttaccgggtggaggagattgcccaactgttggcgatttccaaccgtgctgcgtacaatctgtgcaacaccacgaaagacttcaaggtgatccgcctcggtaccagcatccgggtaagcaagcagagctttgacgattggtttgcagcggtctgagggagggaacatctatggcatctattatgaaacgtggcaacacgtattccgtccgatacaactacaaagatcatgctggcaagccctgcaagggctgggaaaccttcaagaccaaggccgaagcgcaggagcgcaagatcacggtggagaaggaactgctggacggcaccttcctcgtgcccgacaccatgacggtcgaggagatgctgtacaagtggatccccattcagtccagcaagcacaagtgggcacccaaaacctacacccacacggtagccatgattcagaatcttgtcgtgccctatctcggcaagaagcagattcagaaggttcagacgtatgacctcgaacagttttacgccacgctgagccggacaccgcgcggactgtataaacagggtgttaagcaaacgctcaccgacaaacagaagcggcagtttctgacgggtgcttccatccgggaagtccacgccatgctcaagactgctttttcctatgccgttgagtggggtctgctcctcaagtcaccgattccgagagaagccccgaaatcgacctcggaagaacgtgccatctgggacgaaaagaccatgcttgctgcgttgcagaccatgaccgaccctacgctccaccttgctgttcatctgagcatgattctctcgctgcgtgtcggagagatccttggcttgcagccgggagacatcgacttcgatgcagcggatggacgtgggaccatcacggtcggcaggagcttacagcgcaccgaaaaggctgcactggaaaagaccgacccgaatcagatctaccacatcttccccgaccagcgtgagggcagtagctccgcactggtgctgaagaagccgaaaaccaagaaatccagccgcaccctttatctgacgagacccttgaaagaggaactgctggcttggctggaaaagctccgtcaggacgaacttgccatggatggcagatatcgcaactgtggtcagctcttccgcctgcccaacggtatgcctgttgccccggaagccctttctaaatggtaccgcgcatggcgtgcggagcacccggagtttgagaagatcgtgttccatggtctgcgccactccagtgctacttatcagttgattgaatccggcggcaacatcaaggccgtgcagggcaacactggccacgccaccacgggcatcctgatggacacctacgcccacacgcaggacaagccccggttggagctggctgagaagctggaagcagacttctactcgcaggacatcggatcccccaaatccggctctgtgccggtaaaagaaaatctgccggacagcatccagatcaccccggaagggatgctgaaagttgtccgacagatgaaccccgagcagcggcgtgagtttacccgcctgctgttcgcctgaaaaaagtatggaaaaaacgctcacgatgcacagaatgcagacaatgcaaggaaaaacacggctttcccgccggtgtgcaaaaagtgtgcaaaagtgtgcagagccccagaaaatggaaaatcccacgaggaatcttacgattcttcgtgggattttggtgcgctcgagggaactcgaatccctggccctctgattaaaagtcagatgctctaccggctgagctacgagcgcatattccgcagcaaaacaatactgccgaataatattaccacaattgactgcaaaaagcaagagcagcgccgaaaaaagcggaaattcccgcgcaagcgcccggatttgcggcgggagagattttccggcgcacagcattcggcggaagccggtgcgcgccgcctatgactgggtgctgctgtgcagcgtttgcagccggcggtgctctgccccaaaaccggcgtgcggagcatacccggcggcgcacgctcccgtcgggcagaaaaagcagtgcggagcggcagtgtcccgctattatatttaaggtacgataaaatggtgaaacctaaattccgatagttgacaacgtggtaaaatgtggtactcttagggtacaaaaaagcttttgaggagggtttttattatggctatgaagatggatcgccgttcctttttaaagacctctgctgcggtggcagttgcagtatccatgaccggactgctgggcggctgcagtgatggagccattggcacggactttggcctgttccaggcaacggcgggcaaggctatgggtaaaaccaatggcgtcgactttggcggcacagcgggaaccgagtgggaaggctatatcaatgtctgggtgcgcatcaaggagtcctccggcatcaaaaagccgcagccgatccctgcaaagggttatttcttcctgaagatcgatgggcagctgatcgatggctataccgatggaggtctgctggaaaacggcggtaagatcaatctgacgcagggacagctcaaagagggctggatgtgctttaccctgaaaaatgagcagagagcgctgtacgaagctgttgtagctcggaaggccgaggttacttttacgatctcgagcgcaagcgtaacggaggtctataagctggattatacgaccgagacttttgtaaagcagaccgtctgatcccgcagaacaaagttttctgagggatacccgacacaggaggtgcatcgctatgatcaatcgcagaacatttctcaagctcagcgccggggcactggtgctgaccgccgcaggggctttgaccggctgcggggataccgtagtcgacaagaccagcggcgtagccaagatcggtgatgtcacctttatctgtgcaacaccgtttctgggcggcggcgataattttgcactgacctattgcacagagttcactgtccagaacaacagcgctgaaagggtggtcatcaagccggcggacatcacctgcatcttccgcgagtcagatacagaggaaacgctgtatttcaagcggaacgagctgatcgcagcgccgggacagacggtcgtctacaatggctcgcagaagttctatctggagaccaaggagcgcatcccggaaaagaacagtcccggcacctatgagctgcgcgtgcgctacaatggtaaaaccgctgtgttcctctacgggaacaacggcaaaaacgtaacaggccgcgtagagtaaaacccaatacatcccgccgccgggcacttctggaaacaggagtgcccggcggcttttgttttgtgccgcattacctgttctttacattggggctggcattgtgcacaaagttttacgcactttttgcacgtccatggtcgcggcaagggcggcaaagcggtagaataaggccgttcccaaggaaaacacaaaaagacagtgccgggcgggagcccgggtttttaatggaggaaattttatcatgaaaaagatctctcgtcgttcgtttctgaccgtttgcggtgcagctgctgcggctgctgctctgactgcctgcggcggttctgcttcttccgcatccagcaccgctgcttctgcttccaccaccgcttcttccgctgccgggcaggcagccggtaccctgagcggcaacgttgctaccggcggttctacttccatgaagaacgtcattgctgccctgaccgagggctttgccgaggtcgagccgggcgtcaccgtcagctacgaccccaccggttccggcgctggcatcaccggcgctaccgacaagacgctggacatcggcctgtcctcccgcgccctgaaggacgatgagaagtccgctgtggacggcaccaccgtggcgctggacggcatcgccatcatcgtgagcaaggacagcaaggtcgctgacctgaccgtggagcagctgaagaagatgtttaccggcgagatcaccaactggaaggatgtcggcggcgatgacggcgagatcgttctggtgggtcgtgaggccggttccggcacccgcgatggctttgagagcatcgtggacgtgaaggacagctgcaagtacgcacaggaactgaccgctaccggcgctgtcatcagcgctgtggaggcaaacccgctggccatcggctacgcttccctgtccgctgtgggcgacaccgttgccatggtcaccgtggagggtgtggagtgcagcgaggacaccgtgaaggacggcacttacaagatccagcgtcccttcgtgttcgttaccaacaagagcgctgccctgtctgagcaggcacaggcctttgtggactttgccaccagcaaggacgctgccgacctcatccgcaccgctggcgctgtgcccgtgaacgagtaacggttagcgggctcgccctctccgtcattgcttgcgcaatgccacctctcccaaagtgagaggccttggcagtccatgcaaagtctccggtttcgccagaggctctccctttgggagagctgtcgagacacgaagtgtcgagactgagagggcgaggccgttcacaaaataccccgccgcgccggcctgccgtttctgcgagccgacgcggcttttataaaggatttcagctatgaacaaaaaatcctatctgcgccgggtacggctgccccgcacccccgccgactggctggaagcagtgatgaatttcatcttcttcctgtgcggaatgctggcggtgtgctgtgtggtgctcatctcggtgtacatggtggtctccggcgtgccggctatccataagatcggcattttcaagttcctgttcggcaccaaatgggcgtccactgcggcagagccgctgttcggcatcctgcccttcatcctgtccagtgtctacggcacgctgggcgctaccatcctcggcgtgcccatcggcctgctgacggcagtgttcctctccaaggccgcagaccccaagctgcgcaccgtggtggtcaccgccatcgagctgctgtccggcatccccagcgtggtgttcggccttttgggtatgcaggtgctggtgcccgccgtggcaaaagctttcggcaaggcttccggtgcctgcctgctcagcgccatcgtggtgctttccatcatgatcctgcccagcatcgtgtccgtgtcggtgacggcgctcaacgccgtgccgccggagtatgagcagggcagtctggcgctgggcgctaccgacaccgaaacatggttcaagatcagcatcccggcggcgaaaagcggcattgccgcaggcgttgtgctgggcatcggccgcgccatcggcgaagccatggccgtgatgatggtggcgggcaacagccccaatatgccggacagcctgttccgcagcgtcactttgctgaccaccgccatcgccaaggaaatgagctacgccggcggcttgcagcggcaggcactgttcagcatcgcgctggtgctgttcgtgttcatcatgctcatcaacgttgtgctgaatgtggtactgaagggaggaaaccgcgatgaataacggcttttcgccctcccgccgggcatggaaccgggtgatgaccgtgctggtctgggccagcgcagtgctggtgatggtactggttgccgggatcatcggcttagtgctggtgcggggcatcccccacatcagctggaaattcctttccaccaccgccagtgtgctgaaaaagacggacggcattctgcccgccatcctcaacaccctgtatgtcatcctgctgacattactcatcgtattgccgctgggcgtgggtgcggcggtctacctgaccgaatacgcttccaaccggcggctcatcgagatcatcgagttcaccaacgaaacgctggcgggtatccccagcatcatctacggcttggtgggtatgctggtgttcagtcaggcgctgggcttccagacctgtcttttgtccggcagtctgacgctggtggtgatgaacctgcccaccatcatccgcaccacacaggaatccctcaaaaccgtgccgcagggctaccgtgagggtgccatgggtctgggtgcaggcaagtggcacatcatccgcaccatcgtgctgccttgcagcattgacggcatcgtcaccggctgcattctggcggttggtcgcatcgtgggcgaaagcgccgcgctgctgttcaccgccggtgcggcagaggtgatcgccaagagcgtgttcaaagcctacacctccaacggcgccaccctgtcggtgctgctgtatctgcgcgcctttgaggacggcgatttcacctccgcatggggcatcggcgcagtgctgctggtgctggtgctgctgatcaatctggcagcacggctggccaaaaccaaactgaaacagaagcagtaaaaataaagaggtactctatggaaaacacgaatgtgccggtgatatcggcaaaggatctgaacctctggtacggcgacttcaaggcgctgaagagcatttcgctggacgtgggcgagcgggagatcaccgcactgatcggcccctccggctgcggcaagtccacctttttaaagaccctcaaccgcatgaacgaccttgtgccgggtgtgcgtatcgagggcgatgtgcggctgaagggcgaggacatctttgcccgcgagatggagctgaccgacctgcgccgccgcgtgggcatggtgttccagaatgcaaaccccttccccatgagcatctacgacaacatcacttacggccccaagctgcacggcgtgcgcaataaggccgagctggacgagctggtggaaagctcgctgcggggcgcagccctgtgggacgaggtaaaggatcgcctgaaaaagagcgcccttggcctttccggcgggcagcagcagcgtctttgcatcgcccgggcattggcggtcaagcccgaggtgctgttgatggacgagcccaccagcgcactggaccccggctctaccatgaaggtggaggagctgatgagcgagctgaaaaagaactacaccgtggtcatcgtcacccacaatatgcagcaggctgcccgtatcagcgaccgcaccgccttcttcctgctgggggagctggtggaggttggccccacgaaccagatcttcagcacaccccgggacaagcgcaccgaggactacatctccggccggttcggttaatgcagggaggaacaaagcaatgagcattcgcaaacaatacgacagcgatctggaagcccttaaaaccgccttggtagagatggggcagaacgccgccgaggctgtggagaacgcgctggaagcgctgtgcaccgccgacaccgcagccgcccagaagatcgtgcagggggatgaccgcatcaacaacatggagcgggacatcgagcaccgctgcatggctctgctgctgcgtcagcagccggtagcgggcgacctgcgccacatttccaccgccatgaaggttgtcaccgatatcgagcgcatgggcgaccacgcctcggatatcgcggagatcatcccgcatctcgtcaccgtgcgtaaagagagagaccccgccgtcagtcaggccatcgccatgggacgcaaggcctaccagatgatcatagacgccatggatgccctgaccgccgaggacgagatcgccgcccgccgcgtcatcgccgcagacgacgccgtggactacgacttcaacgccatcaagcacacgctggcacaggagatcgccgccgaccccgccaaggtggacgcggcgctggatctgctcatggtcatcaagtatctggagcgcatcggcgaccacgccgtgaacgtggccgagtgggtgcagttcgtgcgcaccgggcgctacaaggacgaaagtatgttctgatcctcactctgcccttttgggcgcgtgttttccttattttcttctggaaaaggctgtctgccgtctggcagacagcctttttctgtgggggaactcccccagtcgcctacggcgacagccccctctgagatggggcctttggcatggcggtacagtttcaagctaaagtggaaagcatccgggcgcgccagaggctccctcccagagggagctgtcaaagccgttaggctttgactgagggagttcgttccaacccctcccgtgaaaataggtttcaggaaagtccgcagactttcctgaaacccgaaatttaaaataattcttccgctgaagatgcgcagagcaacgcggagcgcattcaaaatcgtctgctctccccctacaacgaaaattgactaaaaaatttttatcttttctgcaatatctgcggcgggtgattcgtattcagggtataagagcccggaaagggctccgcagttatcgtgcggcgggtggtccggcttcccccagtcccccgcccgccgcaccattacggaggacagatacaatgatggcaaagcttgaacgctccacgcagcccgcccgcatggaggccgtgagccgcgatgcactggtgcaggcggcgctgcaggagatcaaccaaaattatcgtgaggccagcctttccaacgtggcaagggcttatggtgtttcgctggcgtatgtcagcgagtgcgtgcgcgcccagaccgggcgcacctacaaagagctgctgcaaaagcaccgcatggagactgccgcgcggctgctgcgccgcagcgacctgaatatccagcagatcatcgcgcaggtggggtacgagaacaccagctacttctaccgcctgttccacgagcgctacggcctgagcccccgggagtatcgtatggtgcgcaccggtactgccccccgccgccccagcgcatgaatcccctcttggtttgctgcccccgaccgccgtgctgccgccccgcgcacggcggtctgtctttgccgcaaaatggagaaaaatctggtgctttatggaaaattgtgttatactgaataaaatgcaccccgcgcggcagggcgcgggcgagagaggatgagaagatatgtttcgcggagcggtaagagcggatatggcaaagatccttgaggtctatgcccgtgcgcgggatttcatggcgaaaaatggcaaccccacccagtggggggacaactaccctaccccggagctgctggaagaggatatcgacaccaaccggctgttcgtgtacatgatcaatggccagatgcaggcggtgtttgcctttgtccttggcgaggaccccacctatcagaccatcgaggacggacagtggctcaacgacaccctgccctatggcacactgcaccggctggcttcggcgggcgagagcaagggcgtgggcaaagcagtggtggagtggtgtctggagcactgcgagagcctgcgcgccgatacccacgccgacaacaaggtgatgcagcatctgctggaaagcgagggctttacccgctgcggcatcattcatgtggcggacggcacgccgcgcattgcctaccagcggatgtccctgacccagagccagctggggtgagcagaaaatagttttatttgcagttccgaaacgcctgtgggcgtttcggaactttttttcacagaaggggtttgtatccccccttttgttttttccttccatcacctgtgtgtatggtggggtgaaaaattttcgcctttctgtacaaacgcactgaaaaattgtaggataagaatggagaagacgtcactttcacgctttacaactttacccagataaagtaaaataaggacagaagcctttcattctatgggcgcggaggatgccgcgccggatgtttttgtgtatagagacgccggaattgtgccggcacagggaaagaaacacgggaaaggaaacgagggagcaggatggagttcagtctggagcatctgcagccaaaggagcgcgcctcctttgcgctgcgcagcctgtacgagacggcaggctgccgcaagtaccacatggggcggttcgaggagtacagcctgtatcaggagaaccgcagctttctgtcgtcggagcaggtcatcacctttaccgacctcgatggccgtctgctggcgctcaagccggatgtgaccctgtccatcgccaagacggcgcagcccgccccgggcgagacgctgcggtactactaccacgagaacgtctaccgcccctctgccgagagccacacctttaaggagatctcccagatgggtctggaactgctgggcgctgtgggcgaggccgaggtgcagcaggcggtgtgtctggcggcgcagtcgctggcggcgctgggcgcagagtgggtgctggaagtcagccacatgggctacctgttcggcctgttcgatgcgctgggcgtgccggaagctgcccgggcgcagctgctggaaaagctgcggcagaaaaacgcccacgagctgcgcgccgccgcgctttctgcggggctttccgaaacagcggcggacgctttgtgcggggtgctggagctttccggcagctacgccgctaccctttccaaggcggcagcgctctgccgcaaccccgccatgaccgccgctgtggcagagctgaccgccctggcacccacgctgggacaggcgggcggcaacatccggttggacctgaccttagccggtgagatggaatactacaacggccttgtgtttcagggctatctcaaggctttgccccgcccgctgctgaagggcggacggtacgatttactgctgcaaaagttcacccccggggcgggtgctatcggctttgcggtgtatctggacgagttggaccggctgaacgcgatgccgccggtgcagcatcaggacaccggcaaggtaatgctgaacgtggcgctgcccaaggggcggctgggcgacaaggtatacaacttactggcgggcatcggctacggctgcccggaggactacaacgccacccgcaagctggtggtggagaacccggcagcgggcatccggtattttctggtcaagcccagcgacgtggccatctatgtggagcacggcgctgccgatgtaggcatcgtgggcaaggatatcctgaccgaagccgccgccgatgtgtacgagctgctggacaccggccttggccgctgccggatgtgcgtagccgccccggcgggctaccgggacgaccccagccgcccggtgcgggtggccaccaagttcgtcaacattgcaaagcgctactacgcctccatggggcgggatatcgatatcatcaagctgaacggctccattgagctggcccccatccttgggctttcggatgtcattgtggacatcgtggagaccggcaccaccctgcgggagaacggcctgcaggtggtcaccgagttcatgcccatctcggcgcggttcatcgccaacaaggccagctaccagttcaagcaccggcagatggacaccatgctggaaaagctgcgcgacaccttgcacaagcaggaggaagagaaatgatcaagctgtataattttgacgagctgaagccggaggaaattctgaaccgggacatccgcgccgagaagaacgtggaggacgtggtggacgccattattgcggacgtgcgcgcccggggcgatgatgccctgaaggactacgccctgaaatttgacggtgcagcaatcgaaaatttacaggtgacgcaggccgagatcgatgaagcctttgcgggcatggacccctatttccttgagaccctgcggcaggcggcggagaacatcgagcagttccaccgccagcaggtgcacaagaattttgtgatgaacgaccgccccggcattgtactggggcagaaatacacccccattgaaaaggccggtgtctatgtgcccggcggcacggcggcgtacccttccaccgtgctcatggacgtcattcccgccaaggtggcaggggtgtccgagatcgtcatgaccacccccgccgggaaggacggcaaggtgaacccggtcattctggccgctgccgccaccgccggggtgactaaaattttcaagaccggcggcgcacaggccgtggcggcgctggcctacggcacccagagcatcccggcggtggataagatcgttggccccggcaacatctacgttgccaccgccaagcgcaaggtgttcggcaaagtgggcattgatatgatcgcaggccccagcgaaattctggtgctggcagacggcagctgcaaccccgcgtgggtggcggcagacctgttaagtcaggccgagcacgacaggctggcaagcccggtgcttgtcaccgacagcgcagaccttgccaaagccgtacaggcagagctggaggtacaaattccgcagctgccccgcgccgccattgcccgcgccagcgtggacgacaacggcaagatcatcctctgcaccgacctgcacaaggccattgaagcctgcaacatcatcgcgccggagcacttggaggtctgcgtggaggaccccttcggggtgctgaacgagatccgcaacgcgggcagcatcttccttggccgcaacgtgccggaagcgctgggcgattactttgcaggccccaaccacaccctgcccaccagcggcaccgcacgcttttccagcccgctgggcgtggacgatttcgtcaagaagtccagcttcatctactacacccgggacgcgctggaagccgttgcgccccgcattgcagactttgccgagcgcgaaggtctgcacgcccacgcccgcagcgtgaccatccggtatgagaaataaaggcgactcgccctctccgtcacggcttacgccgcgccacctctcccaaagggagaggccttggcaaagagatgaagtttgcgtggactgccaagggctcccactttgagggccgacttcccccggccgggggaagatgtcgcgcagcgacaaaagggggaatctggcatcgcgcagcgatgactgagagggcgaagccgttcgccataacagaataaacctgaggaaaccattatgagccgttttctttcccctgccctgtccactgtcaccccttatacgccgggagaacagccgcaggatcagcaatacatcaaactaaacaccaacgaaagtccctatctgccgtctccccgggtggtggcagccgtgagcgaagccgaggtggaaaagctgcgcctttactccgaccccgcctgtgcacagctgctgcgcacagcggcggcgcatttcggcttgcagccttcccaggtcatgcccggcaacggcagcgacgagaacctgttctttgcgctgcgggctttctgtgacgagagccacccgctggcctttgcggatatcacctacggctgctacggcgtgtggtgcggcctgctgcacatccccacccacatcattccgttgaaagaggacttcacccttgaccccgccgattaccacggcctgcacgagaccatcgtcatcgcaaaccccaacgctcccaccgggctgtgcctgccccgggatgccatcgagggcattttgcgatcgaacccggacagcgtggtcattgtggacgaagcctatgtggattttggcggcgagagctgcgtgccgcttatcgacaaatacgacaatctgctggtggtgcagaccttctccaaatcccggcagctggcgggtgcgcggcttgggcttgccatgggcaacgcggcgctgatttctgacctgaaccgggtcaagttcagcctgaacccctacaacatcaaccgcctgactttgaaggccgggcaggctgcgctggaggataccgcctactttgataagacccgcgccgccattatggacacccgcgcatggacgatgcagcagctgactgaccggggctttaccgtactggacagccgcgcaaactttgtatttgccagcacagaacggataaatggtggtgaactatacaaagagttaaagaaaaacggcattctggtgcggcattttgatgcgccgcgcattgataactggctgcgcatcaccatcggcacgccggagcagatgcaggcgctgatggacgccgtggacaaaatactggaggtgtgacaatggcagagcgcatggtaacgctggaacgcagcaccaacgagacccagatcgaactgacccttgatctggacggcaccggccgctacgagatcgacaccgggtgcggctttctgaaccatatgctggaactgtttgcccggcacggacggtttgatctggtgctcacctgccacggcgatgtgcaggtggactaccaccacaccaccgaggacgtgggcattgcgctgggacaggcctttgcccgggcgctgggcgagatgcgcggcatctgccgctacggcagcttctacctgcccatggacgaagcgctggtgctgtgcgcggtggatctttccggccggtgcaccctgaactgggacatccactgccagaccgaaaaggtgggcgattttgacgtggagtgcgccaaggagttctggtacggctttgcccgcagcgtgcccgccaccgtccattttgtgcagtttgcgggcgagaacacccaccacattctggaagcctgcttcaagggcgcaggccacgcgctggccgaagccgtgcgcatcgacgcggcacaccgggacgagatcccctccacgaaaggactgctggtatgatcgccattcttgattacggcgtgggcaacctgttcagcctgcgttccagcttgcagcagctggggctgcaggcggtggtcactgccgatgctgctgccatccgcgccgccgaccggcttatcctgccgggggtgggcgcatttggggatgccatggcaaagcttaccgccaccggccttgtgccggtgctgaaagagcaggcagaagaaaagcccctgctgggcatctgccttgggatgcagctgctgtttgaaaaaagctacgaatacggcgagcacgccgggctgggctttatcaaaggcgaggtctgccccctggggcccgaccttacggacaaagggctgaaggtaccgcagatgggctggaacgctttgcacatcgtaaaggatgacccgctgttccgctacatccgcgagggcgagtatgtgtactacgtccacagctactacggcaaaaactgcgccgaaagcacccttgccgtcagcgattattccatcccggtcaccggcgcggtgcgggcagggtgggtgtacggcacccagttccacccggaaaaaagcggcgataccggtctgcggatcctcaaggcgttcagcgaattgtaagcgggcacgccctctcagtcatcgctgcgcgatgccagattcccccttttgtcgctgcgcgacatcttcccccggccgggggaagtcggccctcaaagggggagcccttggcagtacggcaaagtttccgctaaaatgcaaagccaccccttccgtctgctccctttggtcgcagccacactcccccttttgtcgctacgcgacatcttcccccggccgggggaagtcggccctcaaggggacggcttttggcggtagcggtaaggtttccggtcaaaccgcaaagtgtgtggcttcgccagaggctctccctttgggagagctggcaaagccgtaggctttgactgagagggcgaggacgctaaaggagaaacaactatgcagctatttccagccattgacctgcgcggcgggcaggtggtgcgcctgacacagggcgactacgaccgcatgaccgtttacgggcaggacccctgcgcacaggcacgcagctttgtggccgccggggcaaaaaatcttcatgtggtggacttggacggtgccaaggacggcactctttccaactacgataccattgccgcactggcaaagcagggcggcttgtacatcgaggtaggcggcggcatccgcaccgaggagcgcattgaaaaatacctctccctcggggtggggcgctgcattctgggcagcgtggcggtaacggattttgcctttaccgcccggatgctgcaaaaatacggtgacaaaattgccgtgggcgtggacgccaaggacggctatgttgccatccacggctggaaggaaatcagcgccgagccgggcgtggccttctgcaagcggctggcagaagccggctgcaccgccatcatctacaccgacattgcctgtgacggcgcaatgcagggcacaaacctgagcctttaccgtcagcttgcggcagaggtgcccggggtggcctttaccgccagcggcggcatctcctccgagacagagctgctggaattgcagcagatgggcacggcagccgccattctgggcaaaagcctgtacaccggcgcgctggaccttgcccgctgcgtgcagctggtgcaggactgagaaagagggagctttatgataaccaaacgcatcatcccctgtctggacgtgcgcgacggccgggtggtcaagggcacgaactttgagggcatcaaggacgtggccgacccggtggagatggcacggctgtacaacgccgccggggcggacgagctggtgttttacgatatcaccgccagctttgagggacgcgccctttttaccgacatcctgacccgggtggcgggagagatttttatccccctgaccgtgggcggcggcatcaacacactggaggattttgaccgggtgctgaaatgcggcgcggataaggtaagcgtcaactccggcgcgctgaaagaccccgggctgatccccgccgccgcccagcgctacggcgaccagtgcgtggtgctttccgcagacgtaaagcgggtgaacgggcagttccgggtgttcgccaagggcgggcgtgaggataccggccgggatgcgctggactgggtcagctggtgcgccgcccacggcgcgggcgagatctgcctgaacagcatcgacaccgacggcgtgcgcagcggcttcgaccttgaaatgctggacgcggtggctgcccgggtgaacatccccatcattgccagcggcggcgcgggcaaaaaagaggattttctggagctgttccaccacaagggcatcgacgccgggctggcggcgggcatcttccaccagaagctgctgggcatccgggaactgaaggaatacctgaacgccaacggcgtggagatgcggctgtgaaaagcacaaaaacaccttgcatttttatcttgaatacgataaaatacacagtatccccatccggggagggagaaccgtcatggaactgaaatttgatgaaaaaggcctgatccccgccatcgtgcaggatcactacacaaagcaggtgctcacccttgcctacatgaacgccgaaacgctggcgctgaccattgccgaggggcgcaccgtgttctggagccgcagccgtcaggagatctggcgcaagggcgagaccagcggcaatgtgcagcgagtggtgtccattaccgccgactgcgatgccgatgcgctggtggtagaggtggtgaaagacggccccgcctgccacaccggagcagaaagctgctttttcaatgaagtatacgtctccccggagctgaagcagttcagctggcaggggctgtacgagcttattaaaggccgcaaggatacccccaccgcaggcagctacaccacctacctgtttgaaaagggcaaggagaagatcctgaaaaaggtgggcgaagagtgcaccgaggtcatcattgcgggcgaaaaagaggacaaggccgagacggtctacgagatcagcgaccttgcctatcatgtgctggtgctgatggtcagcgcgggcattaccgtagaggatgtgacccgggagctggaaaagcgccacgtgatcgaccacaaggtcaagcaggaaaggatgcagtgagaagcctatggcagattacagaaaatccagcgtacattgccactctaccctgtgtgacggcaagaacaccttacaggagatggcgggtgccgcctgtgcgcaggggctgaccacccttgggttcagcggccacagctacacaaagcccgaccgcgaatactgcatgactcccggccgcaccgcgcagtaccgcgccaccatcgccaagctgaaaaacgagtaccggggcaaagtagatatcctgtgcggcatcgagtgggatctgctgagcgagggcacgcccaccggctttgattactggatcggcagcgcgcaccatctgtacggcaaaaataccggcaaatactacgagatcgatttccgccccgaggatctgcgggactgcatcaataacgattttgacggtgacccgctggcagcggtggaagcctattttgccgaggtggaaaagatcgccgccaaaaagccggacattctgggacatatcgaccttgtcaaaaagctgaacgcggacggcagcttttttgacgaggaatccccccgctacaaggccgcagcgctcagggcgctgcacaccgcccgggagaacgactgcattctggaagtgaacaccggcggcgtataccggggctaccgcaaggacttctaccccggcgcatggctgctgggcgagtggaacaaactgggcggcagggtgcttatcaccgccgacgcccacgacaccgccgcgctgaccttcggctttgacgaagccgccgccgccatcaaggccgcaggctttaccgccctgactgtgctgaccgtcaacgggtttgagcagcaggagttataaaaaagcagttgcgaaacacctacggtgtttcgcaactacacaaataaaaattttttaattcgttttaccgcaaaagaggccactgcacacaaaaaatgtgcaacggcctcctttttgcgcgaagaaaggaatcctatgacccagacgcgacccctgaaaacaaacctcttcaaccggaatgcagacctgctgcacgggcctattttcaagaacctttttctgttcatgctgcccattctggtgtccaatttattccagcagctgtacaataccgtggataccatgatcgtgggcaacgtgctgggcgatagcgcactggccgccatcggctcctgcgggtccatctacgagctgctggtgggctttggcatcggcatcggcaacgggctttccatcgtggctgcgcgttcctacggggcacaggacgaggatctgctcaaaaaaacggtggccgggtcgctggtcatcgggctttgcgcaagctttgtcattaccacggcgggctttttcggcctgcggccgctgttgcagctgctggacacccccgccgaaattttagaggacgcctaccggtacatcatcgtaatagatttgggcgtgctggtgatgttcctttataacctgtgcgccggactgttgcgcgccatcggcaacagcgtgatgccgctggtgtttttgctcatcagctccgggctgaacgtggcgctggatctatggttcattgccgggctgggcatgggcgtgcagggtgcggcggtggctaccgtcattgcgcagggcatctcggtggtgctgtgcattctgtatgtgatgcgccgcgtgccgctgctgctgcccgcccgcaagcactgggcggtgggacagcatttgtactgggagctgttcagccagagcatctccatgggactgatgagcagcatcgtgtctgcggggtcggtggtgctgcaatacggcatcaacgggctgggcacgctgaccattgcggggcacaccgccgcgcgcaagctgttctcctttaccagtatgccgctgatctccatggcaaacgccggctctacctttgtctcccagaaccggggtgccgctcagccggagcgggtgcgcaaagggatgcgcaccatgtacctgtgctcggtggtcatcatggcggcagacatcgtgctgatgcagctttttgcccgtcagctggtgcagctgatctccggttcttccgcgcccctcgtgctggaaaacggcgcacggtatctgatgtggaacgcgccgttctacgcggtgctgggggtactgctgtgcacccggtacgctttgcagagccttgggcagaaggtgctgccgctgttttccagcgtcatcgagctggtaggcaaggtgatctttgtgctggtgttcatcccgcgctacgcctacaacgccgtcatcctgtgcgagcccatcatctggtgcttcatggcggcgtatctcgtggcagtgtaccgccgcgacgcctttgtgtatccaagaaggaatcaataaataaacaaaaacaagcaccggagcgtccgcggacgctccggtgcttgtttttatgatgtttttaccatgcggaaggtctttccgcgcttaatgcagtccagcagcaggtcgtattctgcgggcacttcaccgatgacgttcaccttttcgtctgcgggcaggtcggtgcgcatgagctgaatttcgccggagtagcggccgtagccgatattatccatggtcacgcagcggcggcggcgctctgtgcagttgtccggctgcacggtgctgccaaagcaggagtagagccgggattcctgataccgcacaagcgttttgggcgaatccgggcggcaggtaaaggtgcggtcgtacagcgtctcgtagccggggcgcagggcgaccggcaggcagagctcaccggtggtgcagaagtggcggatgtactcctgctcccgggtgctgacctccgggtcgcccgcaaaaatgccgtccagcccgtagttcagcgccaagtccgcaaaggccgctgagggggctgcggtgcggtgggcttccagcgtgggcagacccttgtacagcgggccgcgcagcagggcgtcgccggggataaagccgtacacctgcaaaccctctgcctgcaaagctgcggtgctctcgcgcagaaattccgggtcaaggccggtctccgggcgggggtagaagttgtgcatggcaatgaccgtgccgccgcctgccgccagctgccgtgccacctccggggtggtggtagaagcgttgacggcaacgggcagctgctgcgcaagggcgcacatctgctccaccgagaagccgtagtccagccgcagaccccacaggtgcagctgctttgccagcgcggtcaggtcggcacagccgaactgccggatagtcttttccgacacgtctgccagaatgcgccagccctgcgcggagagaaaatcgcacatttcctgcacacgggcgcagtaagcggcatcaaattcttcgctgatatgcagtgagataaaaacaggcgcgccgcctgccgcaaaagcggaaagcgacgcacgctgttcctcaaactgcgtcagatacactgaccgtccgagtgttttaagcattggcaacgtcctcaacagagaccattgcgttggtcacgataaagcccatgatgtagcagatgaccagacccactgcgtagcagccaacggaagcagccacaccgtgagggccggcggtcatgacgaacagagccagcagaccggaggggccccaagcagtagcagccacctgcatggccatgacgaaggcaccgccgaaaccggcgcccagaccggcgctgatgaagggcttgcccatgggcagggtgacaccgtagatcagcggctcgccgatgcccagcagacctgcgggcagtgcgccggtgataacgttcttcaggcgggtgttaccgcacttcttagccttgaagtagatagcgacagcagcgccaacctgacctgcaccggccatagccagcgcggggtacagggtaacgtagccaaagctctccagctgcacggagtacagtgccaccagaccgtgatgcatacccatagcgaccatgggcaggaacagagcggtggaaacataaccggcaatgatgcgcacgatcaggctctcgctcatgcacagcttttcaaccacccagcacagcgcggtggaaacataaccggtagcgggcatgatgatcaggatatagggcacaaggcacaggatcatggtgatcagcggggtgaacacgatgtccagagattcgggcatccacttgcgcacccagcgctcgatcttgacaaggcaccatgcgcccagcacaacagccagcacgccgccgcggcctgcacgcaggatggaatccagcggcacagtctcgttgaagagacccagaatggaagagatcttgttgatgccctccagaccggtgatcatgcccagcataccgcccagaatgggggtgccgccgaacttttcggctgcgcggtagccgacccatgcggtcaggtagccaaggaagcaggtgttcatcagacccagcagggtgctgatcagggccagtgcggggatgtcggcgtagttcggcaccacctgaccgatcagggagttgatgccggcgcacagaccggaagccacaacgcccgggatcagggggataaagatatcgccgaaggtcttgaacagctccttgaccttgctctgcttctgcccggccttgactgcggccttgttggtctgccagtcgttggcggtggaagcggcggcgtccgccgggatgcccatgtcgcggcagatatctgcgcacttgcggcacttgccggggccgaccacgatctctacatagccggtacggtcatgcacgatgcccattacgccctcgatggccttcaggccctcgtcgtcgatcttggcgtcatctttaacgcgcacccgcagacgggtcatgcagttggttgcggtgagaacgttgctctttccgccgactttctccagcgccgcgcggaccagttcttcattcgtcataagtgggtcctcctttaaaacaggtgtatatccgatgcggcctgtgccgctaaggaacttgggtgtaaaaatgtgccttacagcacttccagccggatggcttcccgcacatggccgtgtgcccgttccagccgccgggcggcttctgcggcatcgcagtctgccagcagcatggtgatggcggtctttacgctgccgcccgctgcatcaatggcggcgcgggctttttcccgctccacgccggtggcgtcaatgacgatattctcggcgcgggtgtgcagcttttcgttggtctgctgcacgtccaccatcaggttctggtaggccttgccggtgcgcaccatggaaccggtggagatcatgttcaaaatcagcttctgcgccgtgccggacttgagccgggtggagccggtcagtacctcggggccgcaatttacctcgatggcaagctctgcggccttgccgatggcgctgccgatgttgcaggcaatggcggcggtgtgacagcccacgcttttggcgtagtccagaccgcccagcacatagggcgtgcggccggaggcagcaatgcccaccacaaaatcgtctgcggtcaggctgtgggctttcagatcctcaacagccagctcccggctgtcctctgcgccctccacggcctcgataaaggctttttcgccgccggcgatgagccccaccaccatctccttcggcacaccgaaggtgggcgggcactcggcggcatccagcacgcccaagcggccggaggtaccggcgcccatatagaacagccgtccgcctttttcaaaggactctgccgcccatgtcaccgcctgcgcgatctgcggcaggcacttggcaatggccagcggtacccgggcgtcctcctcgttcatgacagtcacgatctccagcggggacatctggtccagctgcatcgtgcgcgggttgcgggtctcggtggtcatcccactcagattcaatcccatttcctgcacctccactttccgctttctgccgcacccttgcggcgtgattgtgaccaaagtataaactttttcaaacaaaatgtccacaaaaagactattttgtggtacaatgttttatgcaagcattgtttttgaaatttttgctcacaagtatgacttttttgtgcagcttgttcaatccatcttgaaatacaacagaggtatcgatatgcagaacgttcttttacgcctgcgggaagtgcagccctccctcagcagcaccgagcggcagatcgcgcagttcattctggaaaacccggacgagaccaccaccctcaccatccgggagctggcgcggcgctccttctcctccccttccagcgtggtgcgcatctgccgggtcatcggctttcagggctacaaggagctgcgccacgccctgacgctggagcttgccacccttggggagaacggcagccaccgggaaaaggatatcaccccgcaggacagtttgcaggagatcgtggaaaaggtgacccacaagaacatccagagcctgctggacacccagcggctgctgttgctggacgaactggagcagtgcgtggaactgatcgccaatgcccgcacggtgctgttgttcggcatcggctcctcgctgtgcgtagcaaaggacacctacctgaaattcctgcggctggacaagccctgcgtggtcaacgaggactcccactcgcagcttttgcaggcgcgcaacgccaccgcgcaggatgtgggcatcgtgttctcctactccgggcagaccatggagatgatccagtgcatcaaggagatgaaggcgggcggcgcaccggtgatcgtggtgacccgctactacccctccgaggtggcgcagctggccgaccatgtgctgtatgtggctgccaacgagagcctgttccgcaacggtgccatgtcctcccggctttcccagctgaacgtgatggatatcctatacaccgcctacgccagccgcaaccacgaggacaccatgcgccgcctgaccaagacccatatctataagcccggcgacccggaggtgctgacccagccgtaaaaaagctgccccgcagggtacaaaaaaggcgcttagcgatttcctcgctaagcgcctttgctcccgttgacgaaagtatagcgttttttgctggttctttcaatccgaaaagtgcagcaactttttcgtcaggcagttttttgttttgtaaagtgttacaatgttccgctttgctttttgttggttttgccatatcggttttcttgccctgcaaaaagccaaacgtgcaaatagggtgcagaaagtgtgcagccgcgatgcaccagaccatgatagcactattcgtgctgctctggctcataacggacatcgtccgttaccctttctttttgtacccgcagtcgcagtaggatccgccggaggcaagggtatactgccgcacaaaatttgtcacaccgcccgcttcgctcatggtgtagtccagatggcacaaagcgggggtcaggtcatacagacccagctccttcatcagcgcacagatgccgcacctggtaaagcgtccctcgtagccgctgccatccgggtattcgtaaaattccatgttccacgagtaagggttgcggtcggcagctttcagagcagcggcagctttcatggtggcaatatcctttggggtaaatttgctttttccgctcttgcggcagaaccactgcatgggcgctgtcatcatggatcttgcgtaataatctgtcagcctgtccacctccgggcgctgcggcatggagagaatgaacgccccgatcatggcgcagttgaccagattcattttgaagcggtcggccttttcaaactccggcagcctgcggatgatctgccggtattgcggctttgcctttttggtgatggcttttgcagtgtctgcatcatagcccagcaccgcggtcagctgcttttgaaaggaaccggcaaacagcgcccacattccaaagggcatcccggcatacttcattgtctgcctccaaacccgatcttcatgatctgcattttcattccgttgtccccgacctttgcaagaaagcggaaaaagccgctgacagaagggtctttcaggtcactgtaacctaacatatatcccctgctggacacctgcaaacggctgtcccatggggaaagctcgctttttgcatccgaaaccgcaaaatacgcccctacatccttgattttagccgtcctgagccacgtttttgcgatcatcttcaccgccgtgcggttggcggcatcgaacaccagcaccccgccgggaaacgcgtctgccatcccctgcaccagcgccctgacctgctgggtcagaaagtaatagaacaccccggaggcaaagaacactgccccgccggaggcatcgatcttgtcaaaccatgcggggtctttcaggtcgcaggggatattttgctcccgctccccggcaggcagaagctgctgccgcaaagcgatcacatccgggaagtccagattgtagatcttgcatctgccgttgtcgcaggctttgccggtgttgtccagcccgcagcccagattgaccactgctgcaccggggtgcgttttcaggtatgcctgcacctcccacgcaaggtcattctgccgcatggccacctccagcgcaccgaaacgctgcatcaggctgcgggagtttttctctgcctgcgaaaagtcgtagtcgatttcatcaatcagacgcaccgccgtctcgtcccggtaaagggtcggatacaactcggtacacagcttccgggaatacagtgggagaatcagcgtctcctgcacggtgtttttctcgattttgtatttcataggttcctccctgttctccttattctgctttccggcagacaaaccatgccatgcccttcactgttccaagtgttacggttgcgtaccgtttctccagccgttttttcaaacggaaggccgtctcatagggcggtgtaaagaaccccatcccttcatagcggcatggtcagaatacccgtgcccaccggcacctccagcagcttgccggaaaaatgctccgggatgccggacagcgccttttccagacgtcctccgggatatgggcaccgaatagttagatgaagctaactttctgctctataaaaagccgcttctcagcggtccttctgccaaaataatacgccctgctgttgtctctgtcaagatgtttaggcgttttcggagattccgaaagagatttcgttatcgaagtctcccctcgccgcatgaaagatgcaaatcgtttcctgcatcgaaaaaattcacctctgcaaacttgtctgtttctgcttgacaacgccctgtgggagtgctattttaatcccacagatttgttttgcctaaccatttgaggggttttacccctgcattttttgcacaaattgttaggcggtgctaaccattttcaaaactgagatagaggtatgttacaatgagattgaaaaaggtatttgcaggtgcacttgcggcggctatgctgatgtgtgccgtggcagttccggccttcgctgcggaaggcgtggagcaggagaactgcctgtcctccagctatgtccagatgaacattccctacgccgacttctacaaggctgccggtgtggacaacgcatctgagatcgatgctgttaccagcgccaccaaaaacaagacccgtgcaggcaaccttaccgccggttcctaccacgtcaacaccgatggcaccgacatcaccggcgtttcttgcccggtcaaggtgctgaccccgtgggcactgaagaacgcaaagcaggtcaccgatgccgacagctacgacattactgttaccctgaagggcaaggaatccactaccacctacaccggcgcagatgctctgtttgagaacgagagctacgcttactacaaactcaacgagaccccggcctactacatcaccgcatggtacaacctgctgagcggcaagtgggagtttggcaaggtccacgccactgagaccactgtagagggcgcagccgtggaactgaacaccaacggtcaccacaccacctacgagatgaagatctccggttttgatctggactacaagaccaacaaggtctacggcgtagtgctgaccaccgccgatggcagtgagtatggcctgcatcacgtgaccaacatctggcatggtaccaagctgggcttcaatgccgatgacccttactttgcatccatcatcggtaagactgttactcagatcaccttctacgccgccgatggcgtgtatgttctgccggtcaacgtggcgctgtgaggtcgcggaaagcttcctgatttagcgaaatacagcataaaacggcaaggccgcctggcagcaggcggccttgccgttttgtagcaatttgtgtttctaggaacatcgttcggagtagcctgcgccgcacagctgctcacacagcagtgccagcagttcggcgttgtcatccacaatgagagaccttgcgcagaaaagcccccgattcgggcaaatgtgcaaacggtgtgcagaaagtgtgcagccgctttcctacataaagaaagaacgtcaaatcttgcgatttgacgttcaatgtctggtgcacctcgcgcactcatatccgaacttttctccgcttttacggcttccccgaaagcgaccgtttctgtaccttccttatagttaaaggtaataagcaccttatcatcgtagagatagatggcattgatgaaggtatctaccagtgcctgccgctgctccggctgggtcatatccagcttacggaaacggagcagccagaaccggacgaattcttctttcatctttggcttagccagccgttcctctgcaatgcgggcttgcagttcttttcgctgatcttccagagcttccagccgctccttggtggagctggtcagaatgcccatctggatagcgttcagcatattggtgatgccggtttccgtttccttcaactgcttttcgtagataggcaggtcagtgctttcctgattttgcagctccatgaccttggcaatgatggcattcatggaagcatcatcttccaccagtttcatggtctcgttgaccaccagatcttccagccactgtttccgcacggcctttttatcgcaggtctttttcttcttggcagcagcacacttgtagtaggtatacattttcccggtgtggctaacaccgctttctccgaacatcagtgcaccgcacttgccgcagtacagcttggtggtgagcagatagttttcctctgccttatgacgggcaggggcctttttatttttcgccagcttttcctgcaccttgttgaacaggttcgcgtttgcgcagcggagcggagcaatgaaagccccagtggggcttttaagcgacagaacggtcttgcgcagcaagatggaggggtctcaccccgacaagttcgcctgacaccaacgccgggatcgcattggtctgtaccacatcccgcaaacgcaattcgccgatgtaccggcgattactcagcatccgctgaattgtgttataggacatctctccgcccatcgaatttttgatgttgtgcgcctttaaccaatcccgcaggtcagtcatggtcgcaccgtccgcatacttctggaacgtctgctccacatacggagccaacaacgggtcgggctggtaatgccgggtctcatcgatcatgtagccgaacggaatcgtgccgccattataaatacccttgagagcattttcggtcatgccgcgcacgaccttttcagacaggtcagccgagtagtattcggcgtagccttccagcaccgattccagaataatgccctccgggccagccgaaatgacttccgttgccgataccagtttcacgccgtttcgcttcagctgagtcttgtaccgggcactgtcgtagcggtttcgggcaaagcggtcgagcttccagacaataatgacatcaaagatgccacgttcgctgtccttgatcatctgctggaactgcgggcggttatcagtcttggcggagatggcacggtcaatgtaatgcttcaccaccgtgaagccgttcttttccgcataggcggtgcactcacgaatctgaccttcaatggattcttcacgctgactgtcagtagaatagcgggcatagatcacggcggtcatggcaggcacctcccatttacacatcattgaacggtggatcgttttttcaaggtaatgtttcgtataatggatataccacattttgcagatgattgcaagcattttttacgtttctcataagattcatcaaaaaaacgaacgctctttaaagacaaaacattcacattccatggttctatgaaagcacccggaggaattgtgtcaaaatgacacaattcctccgctcaccgtgccccctcctgcggcttcaacgcacttttgcggtattgcagagggctttgcccggtggcttttgcaaagcgggtggaaaaattgctggcatccccaaagcctacctcctgtgcgatctcgctgacgctgtagtcggtgaggacaagcagttcctttgcctgtgtgatgcggaagttgaccagataattatacggtgtcgtgcccatataccgccgaaacagccgcagaaaatagcttttgctcatgtgcgcctctgccagcaggtcggcaaggcaaagttcctgctggtaatgtttgcgcagggtctccgccgcctgcaaaatcacctgccgcgcgctggtggcttcagcctgtgcaaggaagctccgggcgcacagcgccagcatctcgtggagcgccagccccatggtcaccatgctgtctacggtgctgcgctccatctgcgctaaaagcgtttcaaaatattcctgcatcttgaccccggtaagctgcaccggggtcagttttttgcccgccagcagcagcggctccatagcggccacccctgcgccgtccagatgcacccaataatgatgccagcagctttgccccggagcggtgcagtagctctgcggggtgcggcagttcagcagcagcgcctgcccggtgctgagcaccacatggctttccccctgctcaatcagccctgcaccccggagggtataaaacaggatgtaactttccttatctgtccgggcggtggaaaaatgctgctgggcgtaaaacactcccgcctcggtgcagtaatagggctgtgccagctctgcttcgctgggggtagtgcgtttccatacactctccggggtcacatccatgttataagtcagcattttccggttcctcactttctgtgttcagtatagcgcaccggtctttgccgtgcaagagtagacttttcacaaagaatgtgtcacctttgcggatggaattgcgagcatcatgccgctatactggtagcagtcaaagccacacaggaggcgcattatgcagaaaaactatcttgccatcgacattggtgcgtccagcgggcggcacattgtgggatggatggagaacggcgttctccgcaccgaggaagtgtaccgttttcccaacagcgtccggtgggtggacggtcatctggaatgggacatcgacagcctgtttgccaacgtgaagcagggcatccgggaagcctttgcaaaatatccgaatatcgagagcctttccatcgacacatgggcggtggattatgtgctgctgaaagacggtcagcccctctacccggtctacgcctaccgggacgaccggacacaggccgtgattcccgaagtccacaacatcctgccctttgcgcagctctaccagcgcaccggcatccagttccagcccttcaacagcatttatcagctgtatgccgacaaaaaagccgggcggctggtgcaggccgaggactttttgatgatcccggaatatttgctgtggaagctctgcggcgtaaaggcgcgagagtacaccaacgctacctccaccggccttgtgaacgcccagaccggggaatacgacccggagattctcaaagctttgggcttgccggaggcgatgttccctaagctcaccgcacccggtacggtgctgggtccgttgaaggcggacattgccgccgaggtgggcgggcagaccaaggtagtgctgtgcgccacccacgacaccgccagcgcggtggagggcatccccatggagcagggcgatgcaccgttcctctcctccggtacatggagcctgctgggggtcaagctggcaaagcccatcaccagcccggaaagctgccgcgccaactttaccaacgagggcggcgtggggtacatccgctacctgaaaaacatcatgggcctgtggatcatccagtgcgtgcaaaaacaactgggcatctcctttgcagaaatggtggaactggccaagaccagcacctacacccgcatttttgatgtgaacgctgcccggttctctgccccgcaggatatgcgcgcagagattcgcacggctctcgccgagaccggcgaagcccctgccacggatgccgacctcatcaacagcgtctatcattcgctggcgtactgctatggggaggctttccgggagctggaagccctcaccggccagcactgggataagctctacatcgcaggcggcggcgcaaagaacgccgtcctgaacgagctgaccgctcactataccggaaaacaggtggtggcgctgcccatcgaggccaccgccatcggcaacttgaagatccagatgagcatttctgaaggaggaaccgtatgagttacgcagaagcaaaagcccgctacgccgccattggcgtggacaccgaagctgccattgcccggttaaagaccgtgcctatctccctgcactgctggcagggagatgatgtccggggctttgataccgaccccaccaagcccctgaccggcggcatccagaccaccggcaactaccccggccgtgcccgcaccccggaggaactgatggcagacctggacaaggtgctgtccctctgccccggcaccaaaaagatcaatctccacgcctcctacgccatttttgacgcagagaacccgtgggtagaccgggacaggctggaaccgaagcacttcaaaaaatgggtggatttctgcaaggcaagagggctgggcgcagacttcaaccccacctttttctcccaccccaagtgcgacccgctgacccttgccagccccaacgaggagacccggaaattctgggtggagcacggcaaggcctgcatccgcatcagtcagtatctggccgaggagctggggcagccctgcaccatgaacatctggacgggcgacggctttaaggacgtaccggcggatcgcaaaggtccccgcgaccgctacaaggccagcatcgacgagattttaagcgagccttacgacttcaagctggtgaagccctgcatcgagagcaaggtgttcggcatcggcgtagaggcctacaccgtgggcagcgccgagtttgccctgagctacgccgccttcaaccgggaaaagtgcattcctctgatggataacggccactaccatcccaccgaggtggtcagcgataagatccccgccctgctggccttcttcccggagattgccctccacatcacccgccccatccgctgggactccgaccatgtggtgctgttcgacgatgaaaccaaggagatctgcaaggagatcgtgcgctgcggcggtctggacggccgggtgaacattgcactggattactttgatgcctccatcaaccgcatctccgcatggacggtaggcttccgcaacgtggaaaaagcactgctgtctgccctgtgtaccccccacgcagcgctgaaggagctgcaggacactgaccagttcaccgagctgatggtgcggcaggaggagctgaagaccctaccctttggagaggtctgggacgaatactgccgccggaacagtgtaccgctggatggcgcatggtttgaggaagtaaaagattacgagcagaacgtgctgagcaagcgcatttgaatgagagaggtttttgaagatgggtattctggatattgaaattgtcaaaggttttatgcggatgtgcaacgatggctggctgcagggctggcacgaacgcaacggcggcaacctgacctaccgcatgaaggaagaagaagtggcacagtgccgtcccttctttgacgagcagccccgcgaatgggtgaacatgggggtgcaggcggataatctggcgggggagtatttcatcaccaccggttccggcaagttcttccgcaacgtggagccggaccctgttcacagcatcggtattgtggagatcaacgacaagggcgacagctggcgcatcgtctggggcttggagggcggcgcaaagcctaccagtgagttccccagccactttatgaaccatagcgtccgcaaggccgccaccaatggcgcaaaccgtgtcatctaccactgccacgccaccaacgtcattgccctgacctacatcctgcccctgaccgaccgggacttcacccgtgcgctgtggcagagtgctaccgagtgcccggtggtgttcccggagggcgtgggcgtctgcccgtggatggtgcccggcggtgcagacattgccatggccaccagtgagctgatgaaaacctatcaggctgctatctgggcacagcacggtctgtttgcctccggcccggactttgacatcacctttggtctggcccacaccatcgaaaagagcgcggaaatttacgtcaaggtgctctccatgggcggcggcatcatccggcagaccatcaccgacgacgacctgcgcgccattgcccacgactttggcgtgaccctgaacgagaagttcctcaactgagccattctccccaatttttcttcatcataacagaacaggcatcctgcccgataccgccaaacggtatcgcaggatgcctgttctgctttatgtttcccggaattccatgggcgtttttccggtgacctgctgaaagactgcgctgaaataattgcgggtggcaaagccaagctgctcggaaatttcccggacgctgaacggtgtacttttcagcagaactttcgcacgttcgacctttgcaaactttacatagttcgtgacactcagacccgtttcttccttgaatttgtgggtgaggtaatattctgtgtagcccaccagggcggcaagatcttccgctacgatctttttgtccagattcatctcgatataatccacacacttctggatctgtctactgaggttcgggtttgtccggtgtttgtggacacgtcggatgaaatcatcgtacatcatcattgcaagggggctcagctcatccagcgattttgccgattctgccgcctgaatgtagctgtcccccagcgagtacgcctcctccggggaaagaccaccctcaatggcggcacggcacaccagcgaggtgaacacgatgatggaggtcttgctctggcgtagcacatcgctgctctgcaccggtacacctgcacttatgctcatactgttggaaagcgcctgcttgtaattcatatctccggtgcggaccatctgcagcattccctgctctgccatccagatcttatgccggtcgtggggaattgtggcgcttttcagccgctcctcctgcgctgtgctgctgttgacacagctcagttccagccgctgtccggtcaggcagtagtgcatcatcagcaggtagcggttcataatggtgttttgcagggtggggactttttcaagggctttgtaaagctggatcgtccatgctacactgatctccagcttgctgtagtatttcagcccgtcctcgatcccgcgcagggtcacgtcctgataaaacaccggcccgatgacccagatgcgcttcagcgctccttcttccttttcaaaggctgctccccacaaaaggcccaaagccgtccccaaggtaacgggcacatcatcccggttcccatgctccagcatccgctgtttgcagccgaacagctcaaatgcgctggcaagaaaggcctcgtccggacagttgctccgtagtagctttccctgtgcatcatagcaccatgtataaacattgccgccgcactggacaagttcggaaagcagcatcatattctggagaacatccatgtgtaacccctccggctcattgataaaaacagtatatcatacttccgccgttttttctaccaatgcccggagccagtgcagcaggatgcccgcagagatagccgcagcaccaacgtctgctatcaggtgcgccgccgcaatgccctgcacgccgcaaagcgcattcatcaggtacagtagcgggatcagcagcaggccctgccgcaaaagagagagcaccaccgcaccgcttgccctgcccacggattgcagcaggttggttgccagataggtcaggccgatcaccgggctgcccagaacgagataagtcaccagctgcgttcccagacggaaagcgccttcttccttgatgaacatcctgatcagcgcattgcgtccggcaaagctggctgctccggcaagaacgccaaagacaacagtcagcaggatcagattcttcaaaagctgcttcaggcgtttcgcgtcgcctgcgccgtagctgtacgccagaagcggctggcagcccatacagatcgccatggcgatcatgctgatgaccatggtcgtcttgcccgccgccgccatggctgcgaccgccgctgtgccgtgggtcaccagcagccggttgctgaaggaggacgcaaacccggccagcaggctgctgatgccgttgggcagaccgatggccagcagctcgcccagcatctgcggctttttcagagccgggcggaagtcaacggtcagcaccgtgccgtgcttaacgatgtagcgcaggtagcaggcagtcgccacaaggttgcccagcacactggcggcagccgcaccgctgacaccgaagttcagcaccagaatgaacagcgggtcaaaaatgcagttgaccagcgtgcccagaagattaccgatcatgccctcttttactgcgccctctgcacgcaccagcatcgccatgctgttggacaggatgaaacacggtgcacccagtgccagaacctgaagataccgctccgcatagggaaaaatttctgcattggagcccagcatccccaaaagcggcactctgcccaccagcagaccgatgctgaccagaacgcccagaaaaaagctggtccagaagcagagcgaggagcagatcttgccctgctcgatctcacccgcgccaaagcagcgcgcgatgatggcactgctgcctgcgccaagcatcgtggccaccgccgcaagaatcgagaacaccggcccgacgacggagactgccgccacctgtgcggtgtcgcccagacagcccacaaaaaacatatctgccatgttgtacagcaccatgacaaggataatgatgatggagggcactgccatggaaaaaatggacttccagacagagccggtacggaaaagtgcttcgttcttcatgatctcctccaaaaatcaaccgcacgcaggcagaacgaaagccccggtcatggggctttcagagcggcatctatcacaggttatccagcgcatccagcagtgccttcagcgctgcttccggcagccccagcatggggccgatcttgccaaaggtcatgccgtaggcggcttttgcctgctgattctcggcaaagccgggcagatactgctccacgatagcctttgcagcctcgttttccatcagggctgcaatggtgctctggctgttcagcttgccgccggtcaaaatttccgggtgcttccagctgctgatgctctggtgcccggcagacagtgcgccgtccaccgggatggctgcgccggtgatgtaccgtgccagaccgctggcaaggaagagtgccagtgcggcgcactcctccgggtcgcccatccgctttgccgggcagtcggatgcgaaaaagtccatggccgcagccggtgcatctccgaaaatgctggtcttggtgtaaccggggcagatggcgttgacggtgatgccgtattccgcataatccagtgccgctgcgcgggtcatgcccaccacgccgaacttggtggcgctgtacaatgcctgtccgcgctggggcacaagccctgccaccgatgccacattgatgaggaagccgccctcgctgtggcttttcaggatagcctctgcaccgtacttcatcccggcaaagacgccctcgctgttcagggagaagatcttctcgtaatcctctacctcatactcatgcagcggtgtgccgcccatgccgatgcctgcgttgctgacaacgccatccagcttaccgtagtgtgccaccgtcttgtccaccagctctttgatggcggaagccttgctgcaatcggtctggataaagatggcgtcgccgcccttgacgcagatgccgtctgccacagcctgcccctgctgggcactgcgggctgcacagactaccttcatgccgttttcgccgaagcactcggcaatggcgcggccgatgccgcggcttgcgccggtgacgatagcaactttatctctgacactgttgaaattcatcattttcataaagcatcctccattttttatttttcgtattcacgaactagatttgcaactcttagttgcttattcatctctatggtgttataatagcactatgccgcaggggctgcaatcagcagtttccggcgtgtccggtgtttaagcaacggatcacgttccaagcgttggttaagcatcctttacgaaatacattgacggaggaattgtatggatatccgggtcaaaaaaacgaagcgtgccattcagaaaacgtttatcgacttgctgcgggagaagcccattgaaaagatcacggtcaaggaaattgccgaacgcgccgagatcaacaaaacgaccttttattcccactatgaaacgctggatgcactcaccgccgaaatggagcggcagacagtccagctcgtctgcgacaatatgcgcggcgcacagcagctgctggatgaaccggaggcctttgtgcaggaaatgtttgctgctctccagcaggcaacggattacctcggtgtggttccggtatccgcgatgaaccgctttacgcagcatttgcgggatgccattctggaaaaaatcaaaggtgacaatatcgagccgtcccaatatgaaaatgtcggtgccatcctgatttttgtaatgaacggtctttccgggcttttgaacaccgacgccaaactggcgcaaaagcacatcaacgtaattgccgccgtggttgcaaatggtgtccatggtctgcatctttcccactgagccaaaacaggctgcgagaagcatcttccgcagcctgttttttgctattgcagcttatttttctgcgtaactgcccagcaccccaaggctaggctttgcggtccgctccatggtttcacggttcacggcgatcaggccgaactgcatggcgtagcccttctgccactcaaagttgtccatcaggctccagtagaagtagcccttcaccgggatgccgtcggcgatgcagtgctgcacgccgtccagtgcctgccggataaacgccacacgacgggcatcctcggcggtggcaatgccgttttcggtgacgatgagatcgcccttgaatgcttctgccactttacggatgacgtgctccagtgcctgcgggtagacctcgtaatccatctgggtcagctctgcgccctccggtgccggaagctgcccctgcgggccataaagagtgcgggtgtagttctgcaccccaaggaaatcgtcctctttaatgtagggcaggtagtgggtaaactcctcctgccatgcggcctcggcaaaggcttcgccgccgggctgtgcctgcaagtcgtggagcgagagggtcaggcccaccttgacttccgggcagatggccttgatggcatcccgtgcggcggcatgggcgcgcagcaccagcaggtcaccctccggggtgcgctcgctgacaaagatctggggctggggtgtgccgaacacctgtgcgttttccatggcggcaaacttcatgttttccatcatcttctggaagttcatgcccacctgcaccgtgccctccgcagactttccggctgctgcggcatttttcgcagcctgttctgccatcaggcggaaccgcttggagatggcggccagctgcaggcccatattggcttcgttgatggtgcagacatagcgcagctcgctgcccagctgctccatcacataggtcacatattttttgaagtcctcgaccgtggattctgcttcccagccgcccttgcagatgagccatttcgggctggtaaagtgcagcagggtggcgatgggctctacgccctgcgccttgcagcaggcgatgaccttgcggtaatgttcgatggcttccggatcaaatttgccttcctccggctccacccgtgcccactcgatggaaaagcggtaggcgttcagcccggcatcggccaggagtttgatgtcctcttcgtaccgatgataatggtcgcaggcaatgccgctggactctgtaaagctggaatggggcagctgctcctgtgcccagtagtcgctgttagtattgttaccctctacctgatgggctgctgttgcagcaccgatgaaaaagcctttttcaaatttctgcatgatggttctccttttatccagaagcagtgttttctcttgtgcctattgtaacaggtctgtgcggcgcaaaaaggataatttttcacgttattggtagatttttcgttgagcgagtataactgcacgaatttttatcctcaatccaagtttttcatcctgcagtatctgttgcattctgttattctggtgtcaggaaaagcggaaaccggttcacacaaaaaggaggaaaatcattatgttccaaaagaaacccagcgccagtgaggtagacggtgtccagtaccgccgtgcaaagctctggcagatcatctgttatgcctgcaacgcctttgtgggtatgagcgtctactctctgatcggtatggccagttattcggccagcatcggctacggcatcaccaccgcaaccgtgggtctcatcctgatgctggcccgcattctggacggctttaccgacccgatgctggcctttgtttacgaccgcgtcaacacccgtttcggcaagctgcgcgttctgctgatcagcggctacctgatcgaagcagtcggcctgctgtgcatgttcaacctgtgctccagcaagggcttcggcctgccggtgtttgccctgacctacattatttacatcatcggctacaccgtcaccaacatgaccgcccagaccctgcctgccatcatgaccaacgatccccggcagcgtcccaccatcggggtctggtccactgccctgaactacgccgtgcccatgggcatgagcatgctgatctacaccgtcatcctgcccaagtgcggcggcaccttcaatcaggacttcctcagcaccgtctgcaccatcgtcctgatcattgccggcatcggcaccctgatcgtctgcgccggtatctctgcctacgataagcctgaaaactttgagggcaccaacaaaaaacacgagccgctgaaaactgcggatattcttgaggtgctcaagcacaacaagcccctgcagtgctacatcgcctccaacgcttccgacaagctggcacagcaggtgggcagccaggccatcatcaacaccatgctgaacggcatcctgatcggcaacatgggtcttgccaccacccttggcgtgatcagcatggtgccttctatcttctttgcagccttcggcgcaaaatatgtgggcaaaaagggcagcaagaagggcatcgtgacctggacctgcatcagcatggccatcacctctgtgctgatcctgttcttcatcttcacagatacccgtcagatcggcgtgatgggcagttggaacatgatcgtttacgtgctgctgaccctgctgcaaaacggctccaatatgtgcatcaccacctccaacacctcttatatggctgacaccatcgactacgagctggaccgcagcggccgttacatcccggctgtggtctccggcacttacagcctgatcgacaaactcatcacctcggtggctgctgtcatcgccaccggtgccgtggctattctgggctacaccaccacgatgccccagcccacggatgcctacacctccggcatcttctggatgacccttgccatcaagtacggtctgccgatgctgggctggctcattaccctgatggccatgctgggctgtcccctgaccaaggaggaaatggtcaacgtccagaagcgcatcgcagataagaaagacgcccttcgtcatgaagtgattgcagaacacatgcagtaacaccccgcaaaaaccgaaagggctcatacgctctttcggtttttgctgattctatccatttttcataaaggagtttttaccatgagcaagaccatcctgctgaatcatagcaattggcattttaccaaggagaaccccggcatccccaccgccattatgggtgaggccatcaccctgccccacacatggaacgccgtggacggtcaggacggcggcaacgattactaccgcggcacctgctggtatacgctggctctggcaaagcccgccatcccggcaggcggcaaagcaattttgcagttggacggtgccgctatgaccgctgtagtctacctgaacggcgaaaagctggccgagcacaagggcggctattctacctttcgggttgacctgaccgaacatctcaaagaggaaaatctgctggcgatcagcgtggacaacagcgacaacgacaccgtgtacccccagaaggcagacttcaccttctacggcggcatttaccgcgatgtaactctgcacatcgttccggcagagcatttcgctttgcccgcaaacggcgcaccggctctgaaggtgacccccatcgtcaccgaccttgccgctaagaccgtcgaagtcactgtggaagccgccgtggtgggtgcacagagcgttacctttgcgctggaaggccagagcatcaccgctccggcggaaaacggcactgcaaaggctgttttcaccctggacaatgcccgcctgtgggatggcgtggacgatcccttcctttacaccgtctctgccaagctggacaacggtgaagagacttctgcccgcttcggctgccggaagtttgagtttgacccacagaagggcttcatcctgaacggccgcagctatccgctgcgcggtgtttcccgccatcaggaccgcaagggggccggcattgccctgacaaacgaaatgatggaggaggacatttccatcattctggaaatgggtgccaacaccatccggctggcgcactaccagcacgcacagtatttctacgacctgtgcgatgaaaagggccttgtcatctgggcagagattccctacatcaccatgcacatgaccaacggccgtgccaacaccctgacccagatggaagagctgatcgtccagaactacaaccacccctgcattgccgtttggggcctgtccaacgagattaccgccgcatccgctgtcaatgaagatctgctggaaaaccaccgtctgctgaacgagctggcccacaagctggaccccacccggaagaccaccatggcaaatgtgttcatgctggagaccaccagccccattctggagatcccggacgtgaacagctacaacctctattttggctggtatctgggcgaactggagcagaacgacgagttctttgacaaataccacgccgattaccccgaccgctgcatcggcttttcggagtatggcgcagatgctaacccccagtatcagagcagccacccggaaaagggcgactacaccgaaagctatcagtgcgtttaccacgagcatattgcaaagatgatcgccgaccgtccttggctgtgggcgacccatgtgtggaatatgttcgactttgccgccgatggccgggacgagggcggcaagcacggcgaaaaccagaagggtcttgtcacctttgaccgcaagctgaaaaaagaccccttctatctctacaaggcctactggagcaaggagcccttcgtgcacctgtgcggcagccgctatgtggaccgcgccgaggatgtgaccgagatcaaggtctactccaatctgccagaggtctcgctgtacaaggacggtcagctggtggagactaagcagggcgacaaggtgttcgccttccagctgcccattaccggcaagcacagcattgaggcgcgctccggcgagcacagcagcgtaattctggtgaacaaggtggacacccccaacccggactacgccatggacaaccgcaagaatgtgaccaactggtttgacggggagctggatgccagctgctggtcggtgaaggacaacatggccaaagccatggcagaccccaaggctggccccatcctgaagcagatctccgataaggccgccgctgcccgcggagatgttgccgctgccgtgaaagacaacccggctctggtggccatgatggagcgtgccatgcagcggatgaccattgaatccatgctgatgcaggcgggtgcttcggaggaggacatcaagcaactgaaccgtgtattgcagggcatttctaaggagtgatctttgatgaaaacaacctattgtaatcctcttgatctgggctaccgttaccagcacatgaaggaaggcccgcgcacagcgggtttccgggagggcgcagacccgacactggtctatttcaagggcaaatattatctgttcgtttccatgtcggcaggtttctggtattcggacgacctgctgaactgggagttccatgcagaccccgacctgctgatctatgactacgcaccggatgtgcggcaggtgggcaattacctctacttctgcgccagccgcaaggggcgcaactgccccatcctgcgcaccgctgaccccctgaccgagccgtttaccgaggtttccgcgccttttgctttctgggacccggatctgttctgcgatgacgatggccgagtgtacttctactggggctgttccaatattgcccccatctacggcgtggagctggacccggacaccatgacccccatcggtgaaaagcaggagctgatcttcggcaatgaaactacccttggctacgaacgccccggcaacaacggcattgtggaccgggaagccagcgtgctgtaccagtctatgaagcagttctatgaccccaaaaccggcaagctgaatctgccgccgcagatggcaaacatccccggcctgagtgccgaaagtctgactgccatgttcaacgccatcggcaaaccctacattgagggtgcctttatgacaaagcataacggcctctattacctacaatacgcctgccccggcacccaatacaacacttacgccgatggtgtatacacctcccattctccgctgggcccctttgtgcggcaggcatccaacccgttctctgcaaagcccggcggattcatcactggcgcaggccacggcagtaccattgccgaccgttatggcaactggtggcacgcctccaccatgcgtatttccgtcaactatgactttgagcgccgggtggggctgttccctgccgggttcgacaaggacggggttctctactgcaaccagaactttgccgattacccacactgcatcccgtctggaaaattcgatgccgccagccagcagccggaatggatgctgctgagctacaaaaagccggtcacggcttccagcaccgcagaaaacagcagtccggagctggcagtcaacgaggactgccgcagctggtggagtgccgccagcgcagaaccgggccaatggctgtgtgttgatttgggaaaggacagcgatgtccgcgccattcaggtaaacatggcggacgagaagctggtagtggatttcccggcggacagctacggcgacgaccgcaagacccgccacatcgagacccgcccgcagatctctcattacacggtggagaccagtgtgaacggcgcagactggacgacccgcgaaacggttgcccgggaatgctccaacggctactacgaatatgccgacggcatccgcgcccggtacgtccgggtcaccggcggcgaactgccctacggacaggcgctgcgcatcagcggcctgcgggtgttcggcaacggcgagggcccgaagcccgcacaggccgaagccgccggggctcgcgtagatgcactggatgcaaagatcacttggcagcacatcgaaaacgcgcagggctgcaatgtccgctacggcgttgcgcccgataagctctatctgagctggctggtgtacgatgcagacgaagtgaccctttccaccctgaccgccgggcaggaatactacgtctgcgtggacagctttaacgaaaacggcatcatgccgggtaagactttcaaactggaggggtaaaccatgcccatcaaagccgttcagcaatttatgctgggcactgtactgagcaacgagcagcaggccaaagagacccttgctgccatgaaagccgccgggtacgacggcattgaactgtgtggatttatgatccaccccattggctttgtggtaaagctgctgaccaaggccgccggtatgccggtgggcaagggcggtaatctggactggcacaagctggtgcaggaggcaggccttcaggtggtcagcctgcacaccgaccttggctctctggagcgggatgctcacgctgtggccgaggaagcaaagagcttcggcacacagtatgtggtcatcaccgggatgtaccgctttgattacggcgatgaagccgccatgcacgaacttgcacagcggctgaacaaagccggggaagctctggcagccgagggcatccatctgctctaccacaaccacaactgcgagctgcggcatgtgaatgcggaaaagcgcgcctacgatatttttatcgaggaaacgaatcccgaatttgtcaactttgagtttgacagctactggttcaccgagggcggtgcaaatgcgctggcatggatgcagcggcttggtccccgcatgaagctgtggcacatcaacgaccggggcacccgcatcaccggcagtgccatcacgcctatcctgaaaaccgacagcatggagctgggcaccggcaacatggacttggacagcctgatggcgcaggcccttgccgtggaggtggatgccgttattctggaaagccaccgcaattgggtggacaattcccccatcaagagcttccagctcagtgcaaaataccttgcgcaaaaattctgacctgccattctctcattattttcttcttcattatccccataaaagcaatgccccgcaccggttactccttccggtgcggggcgttgtgttttgcggggaatctttttgcgttacagggtgtgggtgcccggctgcaaggtcaggcttctgccatccgggagggtgacttctgcggttctgttgcagggcacggtgatggtgtaggtcacggcatcgcctgcatactgccagccgctttcaatgcgccccaccggggaatcgtacactgcttttgcccagcccagagccgggttcggggtgggggcgatggtcagggtctcccctgccagatggatgccgcacacgccaccgaacagccagccgcagatggcaccgtaggagtaatggttcagggattcgctggggtggccgtttgcgtcaatgcccgtccatgtctcccagacggtggtagcgccctgcttgacctcatagagccagctgggagcggtgtcctgtaacagcagcttataggcggtgtcggcatagccgtactttgccagcacctcgcagaggaagggtgtagaaaggaagccggtgttcaggtgatagccgttttccgccaccatccggttcagggtatccgcagcggcttggctctcctcctcgcccagcagtgcaaaggcaatggcgcggacgtattcgcactggcggtcagaagtgattttcccattgtcagtaaaggcggcgcggtacgcctttaccgccttttctgccgtgtcgcggtactgcgctgcgtcctctgccttgcccagcgcctgtgcaatttctgccagaagccgcccggaataagccagatacgccgtacccacgcttttgcgcgggttcatcatcgcctgcatgggagtaatgccaggctcacaccactcgccgtagtccagaccgttcagcaccgtgtacttggcgtatgccccggtctgctgttcctcggtggtctgctgtgcacggccaagcaggaacgcataccacttctgcatcatctcgtagttgtccgcaaggatcttgcggtcgccggtgcgcttataaaggacgtagggcaccagaatggcggcatcgccccagcccgccgacatacagagcatgggggtcatgtagccggggcggctggtgggcggcgcaatgttcgccatgcgtccatccgggtactggttcaggcggcattctgccagccatttttccaccaccgggtagcagtccatcagggtcaggccggtctcgatgaacacccccatatcgccagtccagccagcgcgctcgcgggtggggcagtcggtggggatatcgcagaagttgcccttctggctccacacactgtttttcaccagctgatccacatcggcattgccgcacgcaaagctgccggtgaccggcatctccgaatagacggcgtgggcagtaaactctgcgccggtcaggtcgatgtccgtttccacctttgcgtaccggaagcccatgatggtaaagctgggcttgtagtggttctcgccctctttgcaaacgagttccagcagctgcgccgtgccgccctccttgtggcggttccggtcctgaaagttctcctgcgtaaagttgccgttctcgtccagtgcttcgccgcacagcagcttgattttctgcccggcgtgggcggtcagcttcatctccacatagccagccatgttctggccaaagtccagcacggtctcgccgttgggggtgcgcagcagcctgcccgcaaaggcttcctgctcccggatgggcacggtgttcataccggtgatgggcagggagttcggctcggtctttacgccatgccagccggaaagctcctcttccagccgggcatcgtacacttcgccctgctgcagatcattttggcgaatcgggccgcactgggtggcctccatgtcgtcatccgaaacgcagaccgccttgccgttcacttccagctggaacaggacagccagttcgctgccgaacaggtcacggtcaccatccacgccggaggtgctgcggtaccagccgtcgcccaatgcaatgagcagcttgttttccccctcacggacaagtgctgtcacatcgtaggtctgtgccccaaggtgcttgtctgcggtaaagctgccgggggcaagcaccttgtcgccgacacgcttgccgttcagccatgccgcatacaaccccttggcggtaatgtacagccgcttgctttctcccgccggagcagtgaacgttttgcgcagataacttgccgggcggtggggctgataaggctgcgcctgccctttgccggaggcttccagcgccgcctgcttctgctcccagttgggctttgcaaaggcgttgatggcatcagcgcagtcgatgtccggctcttctgtctccgggcagacccacacgccctgccagtctgcctgtgcaagcccggtctcgaaggaagcggtgctccatgcaccgggctggtcattttcatcccacaggcggatgcgccactgtccctgcgtcttgggcggtacagcggcgggcgtttcggtgtgcatcccactgcccaaaacctttccgctcgtccacagcgttccggctccggcggtcacttcaatttcgtaggcagtctggcgcacacctccggcgcactgccacgacaaaaacagcgtcccggcatccatgccgagcggcgcagaaagatggttcgttttcagatttgttgcttgcatcatctacatctcctttttccggttgatctctgctcttattataaagggaatcccacggagtatgggtgcgaaaatttgtgttgtcggtcaaaaagtcgtgtcatttattataatccaaaaatttcatcttacttcacgacttttcatccgtactgtctccggttttcctgttatactttgggcaagaaaaccagagggctgcggactgccctcaaacgaaaggaaggcattacagaatggacattgaaaagatcctccagcagatgacactggaggaaaaagcagacttctgctccggttcggatttctggcatacacagccggtggagcggctcggtgtgcctgccgtgatgatgagcgacggccccagcggtctgcgcaaacaggacgagcagggcgaccatctgggcatcaacgaaagcatccctgcggtctgtttcccgtccagtgcggcggtggcttccagctttgacaccgctctggcagaaaagctgggcgaaacgctgggcaacgagtgccgcgccgagaatctggccctgctgcttggccccggtctgaacatcaagcgcagcccgctgtgcggacgtaactttgagtatttcagcgaagacccctatctcagcggtgagatgggcgcggcactggtcaacggcatccagagcaatggtgtgggcagctgcatcaagcattttgccgccaacaatcaggagaccgaccggatggtcagcgacagcgtgatggacgagcgcaccctgcacgagatctatcttcccgcctttgaaacggtggtcaaaaaggcaaagccgctgggcgtgatggccgcctacaacaagctcaacggcacccactgctcggagaacaaggaactgctgaccgacatcctgcgcaaacgctggggctatgagggcatggtagtgaccgactggggcgcagtaaaagaccgcgccaagggcatcgccgccggacaggatctggaaatgcccggcggaagcggccgcggcacaaactcgatcctttctgccatcaaggcaggaacgctctcggaggaggagttgaacgctgccgtccgcaacctgctgcggttcgtggattctgtgaccaaaactgaaaacgcgagcgccgtatttgaccgggacgcagactaccggatggcagtttctgttgcagagaactctgcggttctgctgaagaacgaaaagggcgtacttcctctggcaaagggctgcaaggcggtgttccttggcgaatttgcgcagcacccccggtatcagggcggcggcagcagccatgtcaacagtgcgaaggtcagctgtgcgctggagcacgctcccggtgtagcctatgcacagggctaccgcaccgatgaggataccgttgatcctgcgctggaacaggccgccgtggctgctgctgcagacgcagaggtcgccgtgatctttgccggactcccggagcggtacgagagcgaaggctacgaccgcaccacccttgccatgccggaaaatcagaatcatctgatcgccgcagtcgctgcggtacagccgaataccgtggtcgtcctgcacaacggctctgccatcgaaatgccgtgggtcaacgatgtcccggctgttctggaactgtaccttgccggtgacggtgccggagaagccgccgtgaatctgttgtacggcgctgtcaaccccagcggcaagctggcagagaccttcccccggaggctgagcgacaccccggcttatctttccttccccggcgagcgggagaccagcgtttactctgagggcgtatttgtcggctaccgctactacgacaccacggaagcagatgttctgttccccttcggtcatggcctttcctacacgacctttgaatacagcgtactccggctgagccgcagcaccgtccgtgagggtgaagaagtgcaggtcaccgtcacggtaaaaaataccggcgcagtcgccggcaaggaaacggtgcagctctatgtagcaccgcccaagggtgagcgtcaccgtccggtccgggaactgaaaggttttgccaaggtgtccctgcagcccggtgagagcaaggaggtgcagttcacactggacaagcgcagccttgcctattatgagccggaactgcatgatttctatgcagaaagcggcacttaccagatctgcgttggtgcatccagccgggatctgcgcctgaccggcttgctggaatggcaggcagcgcagccgctgccggtacactttaccgcagcctccactctgaagcaggtcatgacccacccggtgggtgctgccatcatcggaccgatcctgcagcatatggccgcagccgcaggcagcgccaccggaaaaaaggacgatgatgattcttctctgtccatgatgatgggaatccagctcaacacgctgattgatttccacgtcctgaccgaggagcagctgaacggcatcctgagccagatcaatcaggcgtaaggcagggattgcgcgataaaataagtcctactctctccactttattgccataaattttccaaaaacctcttgacgcattctacatacagtggtatttttcttgtaaatcccactgcttttgtggattggcccaaaaccatccacaagatgtggtcgtgttcattttgaacacagccacaggaagtggttggttatcaccgtgagacccaccacttcagtgagggaaagtccgcaaaagaatttaccgccccgcaacacacccgatctattttgccgccgtttcacccgacaaaatcatcgctgcgctgcgtgggcggtatttttcttttagggagctgcaccttgaaaatttcatgagccgaccgaacgtgataccgactttccgtcaacgccgctgcacaaacaggggcaggaactgcgttcggagcaaacggtgacccacatacatgagcagcacaacctctacttattttttgcgccttaacaattcggaaacaattacccagaaacggttttgagcgcagcggtagagggcaagaaccgtcccgtggccacaaattttcaattcttgaaaatttcctgtccatccgggacttcacttctcaaactcttgcgagttttccaagtgatcttgttggggcgtgcctgccccaaaccctgccgagtaacaataaagttcataattgttccatggactgagtataacacatccttcgacgatacactactcctctttttgcaaaaatccaattatcttcggtgacctgtcgtgagatgcaattatttcatgtcgtttcaccaatcacttgacttggtttgaaaaaacacagagcatatgatacaatagaacaaataatgttgtctaccgagaaaggaagtgtctttccatgaaaaaaatccataagttcttttctaaagatttgctccatattcttggtgctgttgggatttttgttgcttttctgatttctatcgcctataagcaagttggaatcggggcactcatagctgcgtggcttattgctatggcaattatcggggtagcatggattacagacatccgcaaagcagacctgctgaaaaacggaaagattgtttccggaaaagttaatgcagtaaaaagggttcacataaaattccacatgagtacctatcaccttgctgatgaagatgtaatttatccttgggtgattcggtaccaatacaagattggaaaagacacttattatggacagtcccattggttttggttcaagcctctcgtgagcaagggaacacctataaaggtgactattgaccctcaaaacccagaaagaagcattgttgctgcatgggaaagttaatagattgtttctttcctctatgatgacggaaatttcaaaggagcgtaatctcctttggcacacgactttggaacaaagtctagtgtgttacacctcgatagaggtgtgccgctcccagacacaaaaagtcccatggccaacacctcggcggtgtggtcatgggacttaatgctttttaggcctagcggagtgaacagtaaccaatcctgacatccagttgccgtgtcatttgttgaatactgttttacgaacagtctgcggacgtgaagacccaccattatatcatcagcttcgacccgaaggacgcagtagagaacggcctgaccatggagcgggcgcaagcccttggcttgcagttctgcaaggacaacttccccgctcatcctgccatcgtctgcactcacccggatgggcacaacagtaccgggaacatccatgtccacattgtgatcggcagcatccgaacacgagaagtggagcgcaaaccctatatgcagaagccccgtgactggctagagggcatgaagcactccagcactgcccagaccatgcggcacttgcgtgtcgaggtcatggagatgtgcgagggtgccggactgtaccagatcgacctgctcaacggctcgaaagagcgcgtgagtgaagctgagtattgggtgcgcagacgcggccaattgaaacttgaccgtgaaaacgcagccctcaccgcagctggacagcagccccggcagaagaagtttgaaaccgtgaaagacactttacggaaacagatttcttcggtgctgtaccgtgctaccagctttgaggatttttccgacaggctcatgcaacagtatagcatcaccgtcaaggaaagccgtgggtgtctgagctatctgcccgctggcagaacgaagtttatccgagcgaaacatctcggtgacaagttcgataaggcggcagtgcttgctacgttgcaggcaaacgccgaacgcaagcccaaggcgcagttcaagcaagataccatcgggaaactgattgacattcaggcaaagctggccgcgggcaagggcacaggctatgagcgttgggcaaagaagtacaacctcaaagccatggcacaaactctgatcctcttgcaggaaaaagatttgctcaacgaggacgccctgaaccagcgcatcgccgaactggaaaccaagtatcacgacgcactggcggtggtgaaagacctcgaaggtcgcatgaaattcaacaaagagctgcgctatcatgtcgcagcctacaccagcaccaagaatgtcgcacagcagctaaagactgccaaacgacccgcagcctttgaggagcagcaccgtgcagagctgacagcgtatcggacggcagcagcctatttcaaggcaaacgaccttaccaagctgcccagcccgaaaaaactggaagccgagtatgcgcagctggcatccgaaaaggcaaagttctacgagcagtacaaggaagccaaagaggaactgctcaaactgaaaaccgcaaaacagaatgttgcgtcctttttccgggaggaagaacagacgcagcaggagagataaaggagtgtgcgtatgatcaatctgaagatcgacccggagttccagtcccagattccccctctgaccgatgatgaatttaagcagcttgaagaaaatatcctcaaagagggcaagctgctctctcctttgatcgtctggggtaataccattgttgacggccacaaccgttatgccattctccaaaagcacccggagatttatttctccacgatgccgctcccgtttgaaagcagagaagaagtcctcgcatggatctgcaagaatcagttggggcggcgaaaccttacaccggagcagaagaagttcctcattggaaagcagtacagtgtggagcatcgaaagcccggcggaaacggcaacaaccagcacacggctgctgccaagaaaaccgccccggaggaattgtgtcaaattgacacaattcctcccacctctgcggaagcgagcatccgcaagcagattgcggagcggaacaatgtcagcgaatcctacgttgcccgttctgaaaaattcatgcgtggcgtagagatcatggaacagatggtgcccggtatgcaggagaaaatcctgtccgggcagttcaaagtccgtgatgccgatatgcaccgcctcgccagagcggattttccgaaccgtaagcagatcgtgcacgagattctgcacccggaagaccgtcccgctccgcagtcgagctactcacactactctggaatcaactactccgcgctggaagtcgctgtccggcgggttcagcaggactttgattttttgatgagatacttgcctaagctaccagatgattcctacgccaaaactgaaacgctaaaaatcctcaagcagcacaaagcgtatatggcacagtttgaagaaatgctgaacgataaagaaatcgcataacgacaggcacttgtaagccatcaacaagccaccagccgcaagagcagggcggaaagcatccgcgcccttgcgcctgataaaaattggaactttgattttctcgcccgaatttgccacggtgggacgatcaaaggagcgtgcgtttgaacaaaaagaaaaagtccacaaacacttccccttatcccgatgaagtcatcgaccgtctggcacgggcattctacccggccatccttacctgctggaacagcgaggaaggacagcgggagtttgccgcgtggcaggcggaacaggctcataatgcaaacaacgaaaaacaggaagttcccgcttgctgggtatccgtaaaacagttttcgaaaaatgacacggcaactgcctgtcaggattggttacggagtacccggctaggccgaggaagcatcaagtcccatgtccgcaccgttaaggtgttgggtatggggctttttgcatttcaggaacgtatacacctctggaaaggtgtaacacactagactttgtaccaaagtcgtgtgccaagggtgctgcgcccctttggaatccctgcttacatcgcctgtgggcgatgtagattcgccgcacagaaagctctcacaaaaggcacacccggctgtctgcggcgaggagaaggcacttctgcggaagtgtaataacccactatgacactttcatccctgcggtctgcaaagtgtagtgggctctccgagggggaacggctgtatagggtgcgtttcgagcaaatcgctgtgtacgtgcgtacgggagaagttggtacgcacgtacgcaataaaacggccaagttctcctatataggggtgttctttcatcggagagtatggtatactcggcttagcccagtaaatcgaaattttcggaggcaaagattatgaagaaaaaagcaacaatagtgtctgttatcattgggattcttgctgtagctgcaattattgtattttctgcataccggtcttcggaatcctatagaaaggcaaaggcagcaatacagtgggactgctctgtgacctgtacagaagaatcaacttctgctaagtatgtaatcacatactctgatgtaaaagttttatccaaaacaggtacactaacaattcaaaataaaaatgattttgacattgtagttcatttgctttgcgaaggtgaacaggaagtcgtatctgacaatattccggcgaacagtttttattcttttacgaatgttacggataaagaatatacggtgggtattcatgcggatgttggtgtagctgctgacattagggtcgttgtatatgatggaaaagacacagagccatataccaaatagcgcgactagctaaactcgataaaatagtacttgcagaggtgagcatatttgaaaaaacatcaatgtccatgttgtgggcattttacctatactgttccaccggaagaagactgcgggtatatttgccccgtttgcttttgggaaaacgatccatttattgcttctgatgatgaccccagcgactcaaaccacggaataactctaaacgaagcaaaagccaattatttggaatttggcgcctgtgaagaagaaatgttgcgttatgttcgtccgcccgaaagcgatgagaatggacactcgtaacccaaacttctagtttgccgtactcgctctaagcagggtttggggcaggcacgccccaacaagaaacagtcccaaaggggacaggaaattttcgagtattgaaaatttgtggccacgggacgattcttgctctcacgaaaacccatactttttgaaaatccgcttttcgcagccaaaggaggatgcaccatgaaaaaagagatcgaagccttcgtcaacgcagccaacgagcaggagttggaagccgcatggaataacctctcggcagaggaacagcgagttttcgagcagctcatggaggaagaaccacccgaagatgcactggcatttttcgcacagctgtatgatgatgccccgaaggagcaagccagcgaaaccgtgagcatctccgaaaacgaaatctatttcaagcggcagcccttgaccgaagagcagaagaagcacggctcctatgtagatgagaacggcaatctccatgtcaagaacctgtctgcattctggattcctgaactgaccaccacggagaaagtcggtcacaccacctacaccgtgaccggcagctatgagggcaaggaatcctttttgaagaaactggagcgcattgttgccaagaacgcccagcaaaaatttgaagatgagggtgcagacgaatgacaactgcgtccaattctgctatacttgatccggtaaccaatcctgtactgacagttgctccacagaataaggaggacacaacaatgtctggagcaacgaataaaatcaccgcactttactgccgactgtcgcaagaggacgcacggctcggcgaaagcctgtccattgagaaccagaaggtcatccttctggaatacgccaaaaagaaccacttcccgaacccggtgttctttgtggatgatggctactccggcacgaactatgaccgtcccggctttcagagtatgctggtcgagattgaagcagggcgtgtaggaatcgttatcacgaaggatttgtcccgactggggcgcaattctgccttgactggtctgtacaccaacttcacctttccccagtatggcgttcgctacatcgccattaacgacaactacgacaccattgacccgaacagcgtaaacaacgattttgcgggcattaagaactggttcaacgagttttacgcccgcgataccagccgcaagattcgggccgttcagaaggccaagggagagcgtggagtaccgctgacggttaatgttccgtacggctatgtaaaagacccggagaacccgaagcattggcttgttgacccggaagcggctgcgattgtgaagcgcatcttctccatgtgcatggagggacgtgggccgacccaaattgcgaaccaactgtgggcagataaagttctgactcctaccgcctacaagttgagccatggccggagcacaaacgcacctgccccggaagacccttatcgctgggataaaagagcagtaagtttgattctggaacgccgggagtacactggctgcacagtcaacttcaagacctatactaactctatctgggataaaaagagacatctgaatcctgtggaaaatcaggctatcttcccggatacacatgagcgcattattgacgatgatgtgtttgaaaaggttcaggagattcgcagccagcgtcaccgtatgacccgaacaggcaagagcagcattttctccggtatggtctactgcgctgactgcggttccaagatgcaatatggttcgtccaataacagggacttcagtcaagacttctttgattgctctctgcacaagaagaacgggagcaagtgcaagggacatttcatccgggtaaaggttctggaaggacgtgtgctgagtcatgttcagcgggtgacggactacattctccgtcatgaaaactacttccgcaaggtcatggaggagcagcttcgtgtggaaagcagcgaaaagctgaccgtcctgaagaagcagcttgcccggaatgagaagcggattgtagacctcaaacggctgttcatgaaaatctacgaggacaacgccaatggaaagctgagcgatgaccgcttcgacatgatgagccagagctacgatgccgaacagaagcagctggaagaggaatccctctctatccaacaggaaatcgaagtacaggaacagcaaatcgagaatattgaaaaattcgtccagaaagcgcacaagtacgttcatattgaagaactcactccctatgctctccgtgaactggtgtcggctatctatgtagatgccccggataagtccagcggaaagcgggtgcagcacatccatatcaagtacgacgggctggggtacatccctctggatgagctggaagcaaaagaaaaggcgtgaccgaagtcacgccaaatcttccccatttagggaacttttgcaaatactgttttatgggaactctgctctggggaactccctgttgtacatatcgctatcgtctgtggtcttttgcagggtgcgtcctattcaggggcgcaccctgttttttgttttgcccttaatcttctagcccatggctcccggttacgtttttcaagtattcttctagattgccgttcagaatcaaatccgcatagcccagtgggtcattgtaaataaggtaatccagctccgtctgctgcgccatggtcacatccagcgcatcctcgaccccggtgcagtcgatagaaacctttctgccatcccggagcaacagctccacgcagctggtgtccatgttgaaatgacaagctcttgcatcgtacttcatgtttgtgtcctttccgccttacggcactcttaccgtggtctgtcgtgcttttttgtgataaggtctaggacgtttttcgatggaagcaagggattcgttctgttttccgaagaatacaaaaaatccgaacccttctcctatcggaaaaaagttcggattttgttgatgtggtgcacctccagggactcgaaccctgggcccactgattaagagagcaagccgccggttcgtctcaatttctggaagtttcgagtcatcgttattttttagcaaagcaacgtgatttttcacccggtaatttctgcactctttgtcggattttgcagcgaaaagcaccctttgcacgttttgaaaccgtgcaaaatccgtgcagaaaccgtgcacttactctctgacaaacaaaatcgacctatcccccatcgacttgacggcattggtttgagtggccgcacaccaaaaatcaagtctaggaggacactactatgatgaaactactttcctgccgctacaatatggacaccaaccgggtggaagcccggtttgaggatggcactgtcctttcccctgactgcatcgccattgaggacgagtacggcaacaccccggcacagcgggcagaactggattggctgctctacaataagccattggagtacgcccagcttgtgctgagtggtgagattgaacactacctttcacttggctgcgaccatggcagactggaagattgacctttaattaaaatatccaaggcaaaacaacagccctctacttgcagtcgttgcaaatagagggctcatggttagttagtagttcaacctattatggtaaccatctgaaaatactgatactggtattcatcttctaataccgcctgcatttcttccatgtatagcgggtctttcaacagtttgggatgaaatgctcgctctctccagagtcggactccaatttcgggaaaaaaatattccgttcccagttgcaagtccttttcgttgcaaataacgttatcctttttcattaagctatcaataatacactcggcggctgtattaaacatatccatcccgaacaattttattgatgccactttagacaaatcacgctggatgccgatttcagcagcttttccgttccgatactgcacaagaaagaacgaatcattatccatatatcgtccggttatcaaattagggtcatcggtttccgcacaacattccatttgcattgcttcatcagaagaattcgaccactgtttcttcatttgtagaagagcattttctaattcatctgatgtcatgcctaattttaattgtccaattccaatatgtggttcaataattatctctttcataacaaaaccttataccaaaaagtgagccatacaaatgcagcagttgcacatatcatcagaaccagtagtatcgtacttgcaagttttttctcaatggaaactttctgattttcgcacaagacaatttgctgaagattgtgaaattcggcttcgctgacatttccatttaacgctttccatgtattgcggcgttctgtaaccagcaagaaatcagacagcatttccataaaaatgacggcgaaaaatgccagagaaaagaaccacataccgctccattggcttgctgtcaaagtatctcggagcgttgccggtttcaaggactgtaccgcaatgacataaagtacggtactttgttcacagttgttctccttaatctgctggcacctatacaccgttattcccatcatgtctaaaagcgaattgattttgcaatttccaatgcctggctttccgacacagaacttgcttcaagttcaattgcaacaaagcattctttctcgttatcataagcgagaacgcctaaattgtttactggttctgaatttgcaccatcttgaaaaattaccgttgtaagtgcagtcgttccgcgttccgtggtttgtatcacatcgtatttattatccgtgtcaaacctgtaaaccgatcctagccgaagtgcggagtaaacaatctgcacggaatctctatcaccttcatatggttcataggtactgtatccaaccgcgccaaccaacacatgatttttgtcataaatatcatatactggataagacggattcaggcttgcaagagcaagtggtttattttcagcacgttgcgtttgttctctcttttgaattttccacccttgcggaagttcgattgaaataacactgctcgcttgtcctaattcttcagtttgaaattcaatttgccgatttggtttctccttgttttcagcttgttctcctaaaatatctgatgcgatttgtccatattctttatcagtagtgatggattccagatactgataaagcgtatttctttcttcatccgatcctctatagggaagctctgtttttatgccggataaaacaagctgctgaaagtctttatcattcatcagtttgtcatatttcaacacatacagtgtgtcttgagggaatttgataagacgatttgtcaacaccgaaaagcaatcttctgtatacccaccatccgattctttaagcttttgcagtatttggcttgtgctggcgttttcaagattagataaaaattcctgctcgcttgtcaccgatgtcgatataggagagttcatagaagttgaagaggatacttttgttgcgcaagctgacaatcctatgattgtcgcaaccgaaattgcaatgaagctccttttcatatagagcatacacctcccgtttgtttccatcagaagcttttacttagacaacgcagcaaccaacacatttgttgcaagatttcccaaatttgtttacttaaacaaaaatccatcctcacatttgtgctcatctacaaatatctaggcatttttctgttaacaaatactttctgcaaccttcatcaactcatccaatgaaccatcgcccataattgtgcaggaaacaccagcatcctcccaaaccaaaatataacaggtgacctgccccggaatctcacttgttccaagtgttgcttccttatctccaatctttacagttgtataaacggtatgttcattatcgaatgtttcaatctgtccgtatgcggttataattgaacaatccacaaaatagatttctccggcagcattaacatacgcatgagagaatgtttcctttttatcatagccttgcgtatagtcacgccaaaatccgacttgtacataatgttcactatacgcatcgggaagctgctctaatggttctccctcaactttataagtgacttgcatctcaattggtaagaacttctgaatcatcgtatagactgtcttgcggaagtctgcgcttactgcaagcgcaccgagagttaaaattaccagcgtcagggctgcaacaagcacccgtttcagcatagggcggcgtttatgcaatgccgcttgcaggcgagcatcccatcgggaagtatccgggtagcgttccttaagctgtgctggagttggcagttcgtccagttctttttgtgcatctgcacggagtgctatcatcaatgcagcgtcaaaagaaacttctgtccgctcactcatggctgtttagctccttccacaatagttttcttccacggaaaagccgcatccgaatcacttcgtccgtcagaccaagcgattcggcaatctcccggttggtatagcccattgccaaaaggcgaagaggatcacggtacatcggtttcatttgtccgatcagttctgtcagatgttggatgttatcggtgctgactgctgcatcatctggcactggggcatcatctggtgcgtccgggatttcttccagcggttcttcccgctgcttgcgaagcatatcgtatgcacggcttctactacaactaacgagataagcagcgagttcgtgacagttttctcgatgaattttagaaaaatttttggcaacgtacaaaaacacctcttgcagtacatcttctgccagatacgaatcgcccataattttgtaagcggtatggtagaccagccgtttgtaggtattatatacatctataaactgttcttcgctgctccggtcatccagaactgccagatacattgccagcattttcgctcacatccctcttatcgggaggaattatgtcaatttgacacaattcctctctgcccattcataaaaaccaccacggcagttccagccacaggttatccatagcctgttcctcggtcttttgggcgcggccttttgtcaggtggaaatatatcgccgtaccaatcaaaggatgttccttgccatcagtaaagccatagcggtacagcagataggtctgctcccgttgggtcagccgtttcaggccatcgtacagttcccggcgcgattcctgctcttccataatgctctgcggctgcatagcataggggtcggctatggcttcgatgcgccgcagctgctcttctcccggcagaacatcgtccagcgaaacgcgctggtagcagacgccgtccttgtcctccgttaccatccgctgttcaaaagcggcaaaggcatcccgcaccatgtccatcatggcgttgcggatggcaggagccgcataagtcaggaacttcatgccgcgcgctgcatcgaacttcggcacagctttccataagcccagattgcccgcctgtttcaaatcgtccgtatcaaggttcaggccagcctgtgccaaattcatgctgcgaaaaaggtcattcgccaccttgccaataaaggacttgttgttgtcgatcaggctgtccagcgcggcagcatcgcctttctgtgccagcgcacaaagccgttcattcgtctgcttcatgggcgttttcctgctctgcggcagactgcaagattcccagcagaccgttccgcagctgttccagtgcttccggcgtggctccttccatgcccgaaacactgtccaacattgcatctgtcaactgctctgccgtaatcgttgggtgctgcacatcctgccctttggtcaattcagtgaacatcttctctgccactttcttgctcatggcttcctgttcggcgtaatggctcccgatcccctttttgatttccttgaccgccgccatgaagtacatttcaatgtcatcaagatcgccttgatacaccggctttctccgaaggctgatgtcctttgcggctttggctgcttccggggtcttgacctttgtgcgcagcagggtgctcaatgtcgtgagcatggcgttctgtgctgcgatgccggaagcaaaggtatcatcaaaatactgcgatatgcggtaagtaagctctgcgaagcgagcgttttccagcagcaggttgaccacctctgtattgacacgtcctgtgtagaggttctttgcagcttctacggacaagcctaactcggcaatgtcgtagttcttgcggtcgggaatgttggtttctcccagcagaaaatccgtggacacgttgaacagccttgcaatcctcagcacctgctcatgggtcagggttccctttgcaccgctgataaagcggctgatggtactcttggagcagccgatttccttggcaagctccggttggctgatattgtgctctttcatcaagtccgcaagacggacgttggacggtgcgggcagatattcctgtgccatgtggtcggccctcctttttgatctttttcctcattataatacgctctgccgttttgttcaatatacggttacctctccgcccttgctgttgcagtcctgcaaccagtgagggcatttttctttttccgttgcagttctgccgcttttgcgcctttcctgcaaaattttccgtatattcaggcaggaagcaaaaaacaccagagttcccactttggggtctctggtgcaacgcacgaaacaaaggaggaatgcccttgagcctgtatcaaactgtcaagtccgccatcaccgttcggcaggtgggagagatgtacggcatggagcccgaccgccatggcatggtgtgctgtccgttccattccgacagcgaccccagcatgaagctgaacgacacctattattactgcttcgcttgcggagccaacggtgatgccatcgacctcaccgccaaactgttcgacctgaacccccggcaagccgccgagaagctcgcaagtgacttcgggcttgacccggacaaaccgcccgccaatgccatcgccctgccgccgcccaagcgtggcctgacggacgagcagtggcagacatcgcctactgcctgcgggtgctgaccgactatctcgacctgctgcacgactggcaggagcgctacaagcctaccaccccggaagaaccgcatgacccacggtttgaagaagccctccacacgaccgagaccatcgagcacctgacggactgcgttgcatttgggacgcctcagcagaaggccgatgccgctgcacggctgctgtccgggtcgtacctgctgatgctggaggagcgaaccgaccgccttgctctggcaaagtgcgcctgacgattgattcacctgaagtggcaggtctcaccgtgagacccgccactttacttttctaaaggagaaccaccctatgaagaaaaacatttcccgcaaccccttatggccggactggtacaacggcaagaagatcgatgaagtccagtttggccgcgcctttctggaacagtggccgctgaaatgcgtcaacggaacgctgtacacgctggacggcccagtggaggacgaaagcgagatcaagcagcgcatcttggagaacatcgaggaatatgtcacctccggcctgtccaaaaaggtcaccaacattctggagaccatcaagctgctggccttttccgacccgttccccatcgaacaggactgcatccatctccagaacggcgtgtaccatctgccggacggctcttttcaggagagccgcctgttttgccagaaccgtctgcctgtgaagtacgacccaaaagcacccagccctgaccgctggctgacctttctgcacgagctgctggacgatgccgacatccccaccttgcaggaatatctgggctactgcctcattcccagcaccaaaggacagaagatgatgctcattgtcggcaagggcggcgagggcaagtcccgcatcgggctagtgctgaagcggctcatgggggatgccgccagcaacggcagcgtccagaaggttgagaacaaccgttttgcccgcgccgatctggaacgccgcctgctgatgatcgacgatgatatggacatgaacgccctgcccaagaccaactatatcaagaccatcgtcaccgccgaagccaagctggacttggagcgcaaaggtgtccagagctaccagcgcgacatctacgcccggttcctctgcttcggaaacggtgcgctgacctcgctgtatgaccattcggacggtttctttcgccgccagctcatcctgaccaccaaggacaagcctgccgaccgcacggatgaccctttccttgtggagaagatgtgtgccgagttggagggcatcctgctgtggtgtctggaagggctgcaccggctggtgcaaaacgatttccgcttcacggtcagcgaacgagccgctgccaacgtggacaccattaagcgcagcagcaacaatgtcatcgacttcatggaatccgagggctactttcgcttcaaggcggactactccatcagctccaaggagttctacgacatttataagcagtggtgcgaggacaacgcctgccacagcgtatctgccatccgtttcagcgcggaactgcgccagaatgaccgccgctataaccttgaagccaccaacaacatctacctgcccggtggccgcagggtgcggggatttgtaggcatcgagccgcttgtccacccctgcccgtaaaaagtgcattttttcacggaagaagttcgtacaacctgtacggtctgtacttgtacgcacctgtacggcaaatcgagataaattaaggcgtgttatcgtttatatttcgggtttccgtacaccgtacgaaccgtacaggttatttgaagtccgtacgcaattttttcagatgcgtacggagcaatcaagttcgcattgtgcgaacttgattgtagctctcccgcaggagacgttcccccctcggagagtcctcgaagagcccactacactttgcagcccatagggatgaaagtgttatagtgggttattacacttccgcagaagtgcatctccgttccccgtcacctcccgatgaacctcgaaaggagggatgcccttggcaagaaatgatggtattgaccgcaccagtgtccgaaatcttgccgtttcggacaaagccgttggcaacacccagcaacacaatgagcgtgaaaaggacagctatcggaaccccgatattatcccccagcgcgctgcatggaacgtccacttcaaaaagccaaccgccagctacactgacctgttcgcccaactggaaaccgctggtacgatttcaacgcgcggcctgaagccggatgccacccattattgcgagcttgtctttgatgtcaactcggcctattttgacaatcactgtggctatgagttcgccaagcagttctatgaggatgcctacaaagcagccgttcagatcgtgggtggtgagcagtatatcctctcggcagtcatgcacgccgatgagatcaaccgtgccatgaccgaaacactaggccgcgaagtttaccactaccacctccatgtggtctatgtacctgtggtggaaaagcagatcctgtggtcgaaacgctgcaaggacaaggcactgatcggcaccgtcaaggagactgtcatgcaggtcagccggagcaagaagtgggcatccaagcccctgctggacgatgccggaaagcccgtgctgcaaaagaacggcaagccagtcctgaagaagtcgtacagcgtcctgcaagacgatttcttccactatatgcgcaacgccgggtatacggatgtagagcgcggtgagcgtggcagcaccgaagaacacctgaccgtcacccagttcaaagtccagcgggagcaggagcgactggacactctgaccgcccagattgaccagaaagagcagcacctcacccaaaccaacaaaaccctctccaagaccgaaaaggaacttgccgctgtgcagaaaaaggtcacgctcacaaaagaagccctcattcatgcgcgcgatctggattatatcggcaagcgcacctttctcggtaactactcgctgaccgaagaagaattctccaagctgaaaaaacaggccgaccacggctatatgatggatgtggagaaccgccgcttgaaagaagaactttccaccgccaagaaagaggccgttcgttggagcaacaagtaccacgacctgtggtacgacgtgaaaccctatctggatgctctccaccgtgcgcctgaactggtgcgcagctttttggaaaagattcttgcccccaagcaggagcgcatcatgaatgtgccgcagcaaaaccgtaagcgtgggcaagatgtagaactttaagctgaatttttagatgatatgacaatataaggagcaatgcttatggattttgaccgtaattctatgaccgtccctgtgcaatcttccgattatacgaaaaagttcttgcaaaaggactcgaatcccactacaatggaagtggtcactcaaaccaatgccgtcaagtctccgactgacagcccggcaaccacgaaactggtgtacacggtggaagagatcgcacgaatgctggccatcagcctgcgctctgcttacaatctgtgcaacagcactaccgaattccgtgtcctgcgagtaggcggaagcatccgtgtgccgaaggacagcttcgatgcgtggctctaccgggcagcttgataaggaggcaaacagtatggcatatattacgaagcgcggcaactcttacagcgtccgctacacctacgaagatgagcacggcaagagctgcgacaaatgggagagctttcccacaaaagaggaggcaacgaaccgaaaaaagcaaatcgagcatgaactggccgctggcactttcctgattccgtcctcggtaacggtggcagagttcctgatggactggctgccgaaacagtgcagcaagcacaagtgggcacccaaaacctacgaatccaacctttccaccattcagaatctcattatcccctatatcggtagcatggagatgcagaagctcaagccctaccacatggaaaacctctacacgaccctgagcaaaacaccttgcggttcgtatattgagggcaagaagcaggaactgaccgaaaagcagaagcagcggtttctatccggcaccaccatccacgaggttcatcggctgctgggtacagccttccagtatgccgtagagtggggcatccttgtcaaaagcccggttcccgtggacagccccaagaagtccacgcaggagcgtaccatctggacggtagaggagatgcgggcggctctggacagcatggaggaccccatcctgcatctggcagtccacctcacactggtgggcgcactgcgagagggcgagatcgtaggtctgaccccggaagatctcgattttgatgccgcagatggcatcggaacgtttcgcatcaacaagtccatgcagcgggtgcgaaaagaagccttgaatcaggtggacgatggttgcatcatcaaggtattcccggacaagctggaacgcagtaccacttcccttatcctgaaaagcaccaaaaccgcatcctcctgccgcaccatcttcatgacctccgcactgaaagaggaattgaagaagtggctaagtcagctggcatcagacgagatgaaagatccgacacgctaccacgacagcggaatgctgttccgtctgcccaacggtctggcggtggagccggtactcatccgcaaaaagttcctgaaatggcaggatgcacacccggagttcccgcgtatcgtgttccacggtctgcggcactctagtgcaacctatcagctgatgatctccggcggcgatgtgaaagccgttcagggcaccacaggacacgccacggcagatatgctggtgaacacctacgcccatatccagcagtcctcccgtgtagagctgggcaggaagttcgaggaaggcttctatgctaagtccgaaagccccagcccgcaggctgtacccgccgcaggcgaaccgaccatctctatgactgctctgctggaactgctgaagaatgcagaccccgaagtaaaggcgcagctccgtctggctctgttgacttgatgcaaaatttaccacgcatttcaaagtaattccagcccctgcaaaggattcctacgaaaaagccgaccgtgcaaaaaccgtgcattgaccgtgcagaccccgatttttcggggttacataacaaaaaagaacgccaaatcttacgatttgacgttcaatatctggtgcacctccagggactcgaaccctgggcccactgattaagagtcagttgctctaccaactgagctagaggtgcatattatcagaatgcggtttcttcattctgataatcaaaagtcggcgactacctattttcacaagccgtttccagctaactatcttcggcacaagtaagcttaacttctgtgttcggaatgggaacaggtggaaccttaccgtcatcgacaccgaccgatttgactgaatcagtataacacatttctgtgcttctgtccagtatttttactgcaatccagcttttcgaatcgttggcaacaacagctggattgcgtttcgcaacagatgctgttttccaagactctcaatcctgtcttgcgattgaaggacgtgccttcaaaactgaataatcactgctgacattttttcgttgacttaaaagtctcaagcgaattgtggtcaagccctcgacctattagtacacgcttgctgaatggatcactccacttacacatcgtgcctatcaaccttgtagtcttcaaggggtcttacttgtttgaaacaatgggatatcttatctttgggtcggcttcacgcttagatgctttcagcgtttatccgatccgtacatagttgcccagctatgcccttggcagaacaactggtgcgccagaggtacgtccgctccggtcctctcgtactaggaacagctcccatcaaatatcctgcgcccacgacagatagggaccgaactgtctcacgacgttctgaacccagctcgcgtaccgctttaattggcgaacagccaaacccttgggaccgaatacagccccaggatgcgatgagccgacatcgaggtgccaaacctccccgtcgatgtggactcttgggggagatcagcctgttatccccagggtaacttttatccgttgagcgatggcatttccactcacataccaccggatcactaactccaactttcgttactgctcgacccgtcagtctcgcagttaggctcgcttctgcgtttgcactcttttgcttgatttccgttcaagctgagcgaacctttgaacgcctccgttactctttaggaggcgaccgccccagtcaaactgcccacctaacaatgtcccccgccttgattcaaaggcgcaggttagaattccaatatcgcaaggatggtatcccaacggccactccacaaatgccaaagcacttgtttcccagtgtcccatctatcctgtgcatgcaacatcgaaacccaatattaggctacagtaaagctccatggggtctttccgtcttgtcgcgggtaaccggcatcttcaccggtactacaatttcgccgggcgggctgtcgagacagtgcccaaatcattacgcctttcatgcgggtcagaacttacctgacaaggaatttcgctaccttaggaccgttatagttacggccgccgttcactggggcttcgattcaatgcttgcacatctcctcttaaccttccagcaccgggcaggcgtcagctcgtatacgtcatctttcgatttagcacaaacctgtgtttttggtaaacagttgcttgggccgattctctgcggctccatctctggagcaccccttctcccgaagttacggggtcaatttgccgagttccttaacaacccttctcccgttggccttagaatcttcttcctacctacctgtgtcggtttgcggtacgggcaccgcagaaatacacacagcttttctcgccatcttccatcccggacttcggtactaacttccctcgatcgctaccggaaccaacacccggctccgagacttcaaatgtgtccctgtgtttaactcttttggtggtgacggaatctctaccgtctgtgcatcggctacgccgttaggcctcaccttagctcccgactaacctggagcggacgaaccttcctccagaaacctgaggctttcggccatgcagattctcactgcattcgcgctactcattccggcattctcacttctatacactccacagccgcttgcgctactgtttcaccgcgtatacaacgctcccctacccaatacattgctgtattgcctaagcttcggtgtcaggtttagccccgttaaattctccgcgcaaagacgctcgaccagtgagctattacgcactctttgaatgtgtggctgcttctgagccaacatcctggttgtctacgtatcttcacatcgttttccacttaacctgactttgggaccttagctgtagatctgggctgtttcccttttgacaatgacatttatctgacactgtctgactcccaagcatcaatactctggcattctgagtttgataagcttcgctaacctctcggccgctaggctattcagtgctttacctccaggtatctaacttaaggctagtcctaaaactatttcggggagaaccagctatctccgggttcgattggaatttctccgctacccacagttcatccgccgccttttcaacggaggtcggttcggtcctccatggaattttacttccacttcaacctgaccatgggtaggtcacccggtttcgggcccattgtatgcaacttaacgcccttttcaaactcgctttcgcttcggctccagaccttaagtccttaaccttgctgcatacaatcgctcgccggaccgttctacaaaaagtaccctatcacacattgacgtgctctaggtgcttgtaggcacagggtttcaggttctttttcactcccctcccggggtgcttttcacctttccttcacagtactatacgctatcggtcactgggtagtatttagggttggagggtggtccccccgtattccgaccaggtttcacgtgtctggccgtactctggatcctgcgcagctctctccgttttcacctacgtggttctcacactctctgaccggccttcccatgccgttcggttaacagattaagtcctaaaagcagtccgtaccccggaagtatttctactcccggtttgccctcttccgcgttcgctcgccactacttacggaatctcgtttgatgtctcttcctcgccctacttagatgtttcagttcaggcggttccctcgatatacctatttttaagttcagtataacgtacctgagtatgaacccaggtgagtttcctcattcagaaatctccggatcaatgcttatttgcagctccccgaagcttatcgcagcttatcacgtctttcatcggctcccagtgccaaggcattcgccctgcgcccttgttcgcttgacctttcaaacgttcttttggaacatttggtatcctcttgattctctcttgccaacgaagattattgttacccttccttttgaaattgtaatatttcttaaaaaagaacttactataatctttgtttcgcagttattattcagttttcaaggtacgtctttgagtgtccttttcagggccctcaaaatcgaacaatatctacttaaactttaacttgtcacctgttccaatgaccgaccatcttagatgttctgtcattgcctgactccttagaaaggaggtgatccagccgcaggttctcctacggctaccttgttacgacttcaccccaatcaccagttttaccttcggcggcgtcctccttgcggttagactaccgacttcgggtccccccggctctcatggtgtgacgggcggtgtgtacaaggcccgggaacgtattcaccgcagcatgctgatctgcgattactagcaattccgacttcgtgcaggcgagttgcagcctgcagtccgaactgggacgttgtttctgagttttgctccacctcgcggtcttgcttctctttgtttaacgccattgtagtacgtgtgtagcccaagtcataaagggcatgatgatttgacgtcatccccaccttcctccgttttgtcaacggcagtctggccagagtcctcttgcgtagtaactgaccataagggttgcgctcgttgcgggacttaacccaacatctcacgacacgagctgacgacaaccatgcaccacctgtctccttgctccgaagagaaatactgtttccagcatcgtcaagggatgtcaagacttggtaaggttcttcgcgttgcgtcgaattaaaccacatactccactgcttgtgcgggcccccgtcaattcctttgagtttcaaccttgcggtcgtactccccaggtggattacttattgtgttaactgcggcactgaaggggtcaatcctccaacacctagtaatcatcgtttacagtgtggactaccagggtatctaatcctgtttgctacccacactttcgagcctcagcgtcagttggtgcccagtaggccgccttcgccactggtgttcctcccgatatctacgcattccaccgctacaccgggaattccgcctacctctgcactactcaagaaaaacagttttgaaagcagttcatgggttgagcccatggatttcacttccaacttgtcttcccgcctgcgctccctttacacccagtaattccggacaacgcttgtgacctacgttttaccgcggctgctggcacgtagttagccgtcacttccttgttgagtaccgtcattatcttcctcaacaacaggagtttacaatccgaagaccttcttcctccacgcggcgtcgctgcatcagggtttcccccattgtgcaatattccccactgctgcctcccgtaggagtctgggccgtgtctcagtcccaatgtggccgttcaacctctcagtccggctaccgatcgtcgccttggtgggccgttacctcaccaactagctaatcggacgcgaggccatctcaaagcggattgctccttttccctctgctcgatgccgagccgtgggcttatgcggtattagcagtcgtttccaactgttgtccccctctttgaggcaggttcctcacgcgttactcacccgttcgccactcgctcgagaaagcaagctctctctcgctcgttcgacttgcatgtgttaggcgcgccgccagcgttcgtcctgagccaggatcaaactctttataaatgatatttatcacttaaaagtgttaaatcttgtttcgctcagcacgcaatcgcttgcgtcctgtgtgaattacttttgtttggaattgtttaccgtgtttttccaacacgaaaataggttccgttacaagttctttcgatattgttcaattttcaaggtcctgtgcgccgcagccttgcggctgacgacttgattattttaccacagaagcagttttttgtcaagcacttttttgagaagcttttgaagttttatgaacttggagcgctttgggtttctcggtatcagccggaacttttcagcgtctattggttcttttcaagggcttcccgctggtacttcagaagtcattcttttgtctcagcgcttggcgctcaagtataataccacaccccggggcagttgtcaacactttttgacaagttttttccaaattctttgcggaggggctcgactccctcagtcaaagcctgacggctttgccagctccctcggagagggagcctctggcatatccgcaaactttgtacttcagccggaaactgtaccgtcatgccaaaggccccatccttgagggggctggcatcgcgcagcgatgactgggggagtttttccggcggcgtcctctccacaccccccaccaaaagccttgcgtatcggcggcgggtgcgctattatatattatatacattatagagcgctgcgaaaggagccctgaccatgatcctcaccgtcaatatcggcaacactcacatcactgtgggcggctacgaacaagatacccttatcttctgcgggcggctgcactccgaccccgctgccacggtggaggaatacgccatccggctggtgaatctgttacagctgtaccaggcatccccggcgcagatcgagggcggcattctgggcagcgtggtgcccatgctcagcgggcgggtgctggcggccttacagcttttatgcaaggcacgcatcctgaccgtggggccggggctgaaaagcggcatcaagctgcggctggacaaccccgcgcagctgggcgcagagctgctgtgcggcgcggtggcggcgctggcagagtgccccgggccgctggtggtcatctcggcagacacggctatctccctgatggcggtgaacgccaagcaggagcttgtgggcggcgtgatcctgcccgggccgcagctttccatgaatgcgctggtgcaaaagaccgcgcagctgccccagatcgaccctgcagcccgcgcatcggattcggtgctgggcaaaagcacctcggcctgcttacaaaacggctttgtgctgggcactgccagcctgctggacggtctggccgaccgcttctgcgccgaattgggcgcgcagacagccttttacgccaccggcgaccttccccgctccatccgggaggcctgccgcacccccatccactaccgcgagaccctgatcaccgatggcctgcaccgcatctggctgcgaaaccggaagggttgacgattttcgtttgcattttgcatcccgatgtgttatactgtgttgtacccaccaaaggggtacggcatttgcgatcgtagctcagctggatagagcgttcggctccgacccggaaggccagaggttcgaatcctcccggtcgcaccaaggactgctgcacaggttttgtgcagcagtcctttttatttattttatcgaatccatcttgcaaaagcggcgcagtgccttataatagaggctgtgccccggtgtgcgcgggcacggtttaggagtgtataggataaaggaaataaagagtatgagttctcaaacgaatacgctgacggaaggccctctggccaagcagatctttctggtcagtctgccgctggcgctttccaacctgctgcaggtgctgttcaatatgtcagacgtggcggtggtggggcgctttgccggttccacggcgctgggcgctgtgggctccaccagcacgctggtgaccctgttcaccggctttctcattggtctgagcaacggcatcaacgtgctggtggcgcgtttttacggcgcgcgccatcccaaggacgtggaaaagaccgtccactcggcggccatcatcagcgccgttgccggtgtggcgttgctgctcatcggtctgctgggctcccccgccatgctgcggctgctgaacaccaaggaggatctgctgcccggcgcgatcttgtatctgcgggtgtattttctgggtatgccggcgctggcgctgtacaacttcggcaacgcggtgttcagctccatcggcgacaccaaaaagccgctgatgtatctgtccattgccggtgcgctgaacattctgctgaacctgttctttgttatcgtgtgcgatctgagcgtggtgggcgtggcgctggccagcgccatcagccagtgcgtttccgcatttctgatcctgcgggcgctgacccgggtgcaggactgctacgcgctggacccgcacaaattacagctggacccggtacaggccaagagcatccttgcgctgggtgtgcccgccgggctgcagaacgctatttttgccattgccaacctgttcattcaggcgggcgtcaactcctttgactctttgatggtcaagggcaacagcgccgccgccaatgcggacggcctgatttatgattgcatggcggctttctacatggcctgcgccagctttatgagccagaactacggcgcgggacggcctgaccgggtgaagaagagctacttcatcagtctgggctattccttcggcgtggggcttgtgctgggcgcggcgctgttcttctgcgggccggccttccttgcgctgttcaccaccgaagccgccgttatcgacgccggcatgaagcgcgtagctgtgatggcctttgcctactgcgtctcggcctttatggactgcaccatcgccgcctcccgcgggctgggcaagacggtggtgcccaccgtcatcgtggtgctgggttcctgcgtgttccgggtgatctgggtgtacaccatctttgcccacttccacaccatcccggcgctgtacctgctgtatccctgcagctggacgctgaccgcgctggcagagatcgcctatttcgccagctgctacaagcgtgcaatggctatcttccgcaagcccgcggcggtgtaagagagcgatttggaatgcgcgccgcgttcgctttgcgcatattcagcggaagaattatttttaatttcgggataccggagcgtctgcggacgctccggtatcccttttttcacgggagaggtcacaaaggcaaactgcatttgcagcgcttgttctcccacgcaaaaaggctgctgcacggttttgtgcagcagccttttgctttttataggtcaggggtcagagcgcagctcagatctcctttttcagggtctcgcccatgatgtagccgtaggtcagagcggcgtcgaagcccatgccgtactgcttggcgtccttctcctcgatggagccgcagacgtcgccggcagcgtacaggcctgggatggccttcttgtcctcggtcaggacgtggcaatcggtgtcgatggccagacctgcggtggtcaggtagaaggtggggtcaacacggatggcccacagaccgtcgcgggtctcgatgtaggggcagttgcggcggccgaactcatcgggctcgccagccagagcggcggcgttgttggcctcgatggcgtctgccagattgggcaggttcagctcctcggaagccttctccacgctgtcgtagtgcacagcctcgcccttctcgaacatggcaacgtaaccgttgaagccgtaggactcgctgtcgcgcagcttgacggcagaggactcgtcgaacacatagtagaaggtatcgccgttgtccttgttcagctttgccttggccatggtgtagtggttatcggagacgatgttgccgatgttgtcgcccttgatgttgaccatgatgccgggggcagactggtggatgaaggccagctcgaacttgctcttgtagctggacaggaaggcgggcagagcgcggttctcgcactccacatagccgccggcgtcgatacccatctggatgccctcgccggtcatgctggaagcgcagttgaagaagaagtcggcgtagtcggggctgtacttcttcagcatttcggggttcttggcaaagccgccggaagcaaggcagaccgccttgccgcgcagggtgtagcttgcgccgttctcgcccttggcgtggaagcccacaacacggccgctctcgtccttgatcaggtcggtgacgctggtggagtagatgatcttgcccttctcgtacttctccacgcgctgtgccatgaacatcatggcgtagcctgcgccgccctcgtagcagccgggtgccagatacggggtggaagcgccgtactgggtagcgctttcgtagttgcccatggtgttgaagccgatgccgatgcctgccatccagtccaccagatcgccggcgacggtgtactgcttggtcatgtagggcatttcgccgttgaagaactcggtgcggtggtacttctccatggtctgccagaagttcatcatgccctccagcgtgcccatggcagagctgcggaagctgccgtccacatcgtagttgtactgcagcttggagcctgcggtggcaacgccgccgtaggtcatggacatggagccgccggggatatcgcgcttctccaccagaatgacgctgtagccggcctccagcaggcggcaggcgcaggtcaggccggaggtgccggcacccatgatgacgacatcagcctcttcctcgatgacctcgttggaagctgcaatggtgacttccttggagaagtcgtccacgttatagccggccagctcgatggcctccttcacagctgccttgacagccattgaggtgatggaggagccgcgcaggttgggcacgttgacgctctggtgctcgacgatagcggcagggatgcgggagcaggcgtagttgccgatgccgatggtctcctcgtgagacagcacctcacaggcagtgatcttgccgtcaaagaaggtggtagctacgtgcacccagctttcgtgacccatagccttggtgacgtacttgccgtccaccggggaggagggcttggtcacagcggaggaagcagcagaggaagctgcggaggaagcgggagcactggtggtgctggaagcggggttgccgcaggcggtcagcagaccggcagcagctgcgcccatggtgcccacagcggcaccgcgcataaagttgcgacgagagatcttagccataaggttcgcctttctttttcttttctcttcttttttgcgtttttcctgttccttcgtgcattttgaacattgatacgattatagcaaagtttcgttccagtgtgaaatacaaatttgcatcctcatttatcaaatctctttataaatcactttctctttacggcctgtcagcaatcctgtataataaagatgaccatcttttttacccaaggaggcgcgccgttctatgacgatttaccagttggagtgctttattgccgtagcggaggagctgaatttcagcgccgccgccgagcggctgttcaccacccagcccgccatcacctaccagatcaacgcgctggaaaaggagaccgggctgcacctgtttgagcgcaccacccgccgcaccaagctgaccgccgccgggcagtccttttatttggacatggtgcagatgaccagttttggcaggcaggcgctgaaaaaggcgcaggatattcaggaagccgaccgctcccgcctgacggtgggtctgcggcagctgttcgactacggcactttttccagcattcttgccgagtttcagcaccagttccccaacgcctgcgtggacgttgtgccgcaggacaaccgccgcccgctggaacagctgcgctccgggcagctggacatcggctttttctacgccaccgagcactcccgcgaccgggatatctcctttacgcccctgttctcgctgggctatcatgtgctgatgaaccccaactctccccttgccgaccggcgggcgctgcatctggccgacctgaaagggcagagcgtggtgtcctccggtgcgttcgacaactttctgtccgcctgtcagggaccttcgctggagcagctggcgcaggtgggggtggattgcagcaagatctctcccagctttgagggcgcgctgatcatgatccagatgggtactgccatgtccatcgtgccctgcctgtccacggcggtgatcccgggtatcgtcaaggtgccgctgctggattttcccccggtgacggtggagatcgccgccatgcgccacgcgccccggctggaggtgcagtcctttatcgagatcgccaagcagaagtacgcccatccccacgacccgctgctgatggagacgctgatttaaaccccctcaggcgctaatgcgccagattcccccttttgtcacctgaggtgacatcttcccccggagcgggggaagtcggccctcaagggggcgccttttggtataacggaaaagtttcccgtgaaaaagcacaaagccggacagtctacggactgtccggctttgtgtcatcacaaggttttactgataatcgtggttgaggaacagggccttgatgaccaccacctcgtcgtattcctcctgctccacctgcacgtccgcgttcaggctcttcaagcgcgccttcaccgcatccagtgcttccggcacggtgacggcgttgccttcctcgatagcgtccatcatccgcttgagcacgatggggtgggcgtaccagcttttcaccgggaaagccccgtgggggtagtgcttgacatactccgccatggcggcttccgccttgtccgcacgcttcatgatggcgttgttgttattgtgggcggtgggcagcatattgtagctggaaaacaggaagatggcggcaaagccgaacagcgcaaagtacacaccgtagctgccggtgtggctgaacacggaatacagaccataggctgccgctgcaacgcccagcacaaagatggccagcgccacatagcggtacaccggtttgctttgcagctgcgcacgcttgcggcgctgggcagcgctcagctccgcagaaagctccggctttgcgtccagatagtcctttgcccggcgcagcacggtaaggctgtgctgtgcgtcctcggaaagctccggcagcttgcgggcagccttttcggcggcttttttctccagcgcctgctctccggcggcgctcagcagatgcagctgcggctgctccttggcaagcactgccagcagggcgtccacgtcccgctcgtccttgaagttgcactgcttctgcttgccgccatcgtactccaccacaagatacgccatggaggcaaacacgcccttgccggaaaaaccgccggagctcatagccacccgcttgaacacccgggtgatgctgccgtaaggcagataatagcggcggtcgatgtaaaagctgttcaggtacagcgcctttttgcccacaccgcaggggccgatcttccggcaggcttttttgtctgcctccagctcctgcgggtcaagctttgccatgcccagctgtgcgggtttgaaaatcatgggtagttcccttctttgctttaaattctacgcccctattttcccacggggcgggggcaattgcaagccttgatttttaaaaaacagcgcccgccgctgtacggtcaggcagcggcgggcgcaggttacttacggaaatatggagccgtcagttccttatgccttggaagcggtatgcttcttggtagcatggaggaacagagccagcattgcgatggcaaagacgatgccgatggggtaagcaacggcggtgttgtaagccaccagcttgccgtccgcataagtgttgatcatcttgcccaggcactcgggagccagcacgaagtaggtgcaggacacagcgctcatgaaggtagcaggcacggcggtgatccagaagttcttcttctccttgaacaggtacatggaagcagcccacaggacgatcatagccagcgtctggttggtccagctgaagtaacgccagatgacagtgtagttgatgaagcccagtgcgttgccgatgccaaggaaggcaccaacgcccagcacggggacacacagcttcaggcggtttgcgtagctgtcctgatcgatcttgagccagtcggccagagtcagacgagcggaacggaatgcggtatcaccagaggtgatggggcagataacgacaccgatcatagccagtgccacgccaaccttacccatggtcttgaggcagacgtcgtagatagcggcagactgaccggcagccagagcctcggccagaccgaccatcttgccgtcggtgatggtgtacagtgcgcagccggcagcagcccaaatcagagcgatgatgccctcgctgaccattgcaccgtagaatacgaagtgaccctgcttctcactcttcatgcagcgagccatcaaaggcgactgggtggagtggaaaccggagatagcaccacaggcaacggtgatgaacatgaagctccagataggagtgttagagggatgcatattgctgaagtttgcccagatctcggggatggtgtaagcggggttggtaaagataccaaagataacgcccacagccatgatgatcaggcagatgccgaacagggggtagatcttaccgatgatggcatcaatggagataaaggttgcgatgaagtagtacaccagaatgatgatcagccagaacagagtggtggtcatcacaccggacataccgccgttcttgcacagggtaacgatcagacctgcggggccgactgcgaacacggtaccgaccatgatcagcagcaccacagagaacacacgcatgatgttctgcatcacggggcccagatagcggccggtgacctcagcgatggaagcgccgtcgttgcgctcgctcatcatgccggagaagtagtcatgtacgccgccggcaaagatggtgccgaaggtgatccacaggaacaccacgggaccccacagagcaccctgcagtgcaccaaagatggggcccagacctgcaatgttcagcagctggacgaggaacagcttccactggggcatcacaacgtagtcaacgccatcgttgatgcgcacagcaggagtttcgcggtcgtccggtccgaacgtgttgtccacgatcttaccatagacaaagtagccgatgataaggagcgccagacacagtaagaaactaatcataccagaaacctccttttgaatttcagccgccgacagcttatgccatactgcggctatgaccgatctctggcttcatgttaacacctttttcataattgtgttaatattttttaggtatagttcccatatcaaaaagtatatggccgcttattttatttgtttacgcaaacttttattttgtggcgataacacgttttaattcgtcgttttgtttctcaaaaactttctcccggaaacggtcaagcccacccccgccaaactttgcgccgcctttttgtgcactttgcttaatcgtttgcgattttctccccaaaacgtggaatttgggacgaaaagaagggaaatctgccctctcaggcgctcccgagggaactcccccagtcgcctacggcgacagccccctcggagatggggcctttggcatagcggcacagttccaggctgaagcacaaagcttgcgggcgcgccagaagctccctctcagagggagctggcaaagccgtcaggctttgactgagggagttcgttccaaatcccacctgtgaaaaagggattcaggaaagtccgcagacgctccgctagcccgaaaataaaaataattcttccgctaatgatgcgcaaagcacacgcggcgcgcatttcaaatcttcttccacccgctgtccttgatggtggcatccgcctgcttgtgcagcagctgcacaaacagctgctcctccggctgcaggggttcccgctccgggtacaccagcacgtcccgcatctgctgcttctgtgccgggcagccgtgcagcgccagatggtactgctccagcgcgcgctgcggcatgggggacgaccacatataggccgtgggcaggttctgcaaaatggagaactggctgcaccgctcgtacacatggatgcggcggttggggttcacctcccagcgggaagcggtgctctcgtccccgggcagatgggtgtcgccgtgcagcacctcgatgtaatcgttcagttcgtcaaggttctgcacctgacgctgtgccagcgggctgtcctgactggtgagcagcaggtaggaaaactccatgatgggctcctgccgcaggccgtggcgctggcagtagcgcaggtagtagtcctcgtcctcggcggcgtagcgcagcagcgccatgtggtagccctgccgcagcacaaagtccagagcttcaatggcaccgctctcccggatatgtgcccgcagctgctcgctgcgggctgcctgctgcaaaaaatccaccgccgcgtaggaggcgtaggtggcatgggtcagcaccacccgcagctcggcgcagctgcgctgctggtgcgcctcctgcttcagctcgtccacctgctgcagcacccgctgcgcctgcgcgatgaaccgcttgccctgctcggtggggatcatgcccgtggaggagcgctcgaaaatgcgcaccccgtattcctcttccagatttttcagcgccttgctcacattgggctgcgccgcgtacagctgctttgccgccgccgacaccgacccccatttcatgatggctaccagataccgcagttccgtaatattcatgaacccctccgcgtggtttgcagtcataatcgtattgtaacaatttctccgcgccgctgtcaagcggggggacgaactcccccagtcatcgctgcgcgatgccagccccctctgagatggggcctttggcatagcggtgaagtttccagctaaagcacaaagtttccgggcacgccagaggctccctccccgagggagctggcaaaaccgtcaggttttgactgagggagttcgttcccccttgcaccaaagcacccgggtgctatataataaggaaaaacacaaaggaggggctgtaccatgccggaataccgtgtgctgcgcattgacgagcagctgtacggctgcgaggagctgcccgccgggcagccggtgctgtgcgatgtgaccctgaccgatgccgccggggctgcccgcatcctgccctacccggacaaggagctgacccgtctgggcatcgacgaggaggacaccgtctgtctgctgccggacggcaccctgcacaagctgtaaggagtaattttatgcataatatctatttcacccgccacggcgagacggtatggaacgtggaaaataagatctgcggcatgaccgacagcccgctgaccgcccgcgggcaacagcaggcacggcagctgggcgagcttgtccgggacagcggcctgcacattgacgaaattctgtactctcccctctcccgcgccgccgacaccgcaaaagccattgccgccgctaccggtctgcccgcccgctgcgagccccgcctgcgggagcagtgctttggcaaatacgagggcacgccccgggacggtgcggagttccgcatctccaagacccactttgccgaccgctatgacggcggcgaaagcatgatgcagctggcgcagcgcatctacaacctgctggacgaattgaaggcggacaccggcaagacctatctgctggtggcgcacaacggcattgcccgggtggtgcactcctatttttacgatatgaccaacgaggaatacgccgctgcgggcatcaaaaactgccagctggtggagtataccttttaaggcttttcccgataaataaccgaaaggatttttatgccaaagaaaaccatccaattgtccgaccactttacctattcccgcctgctgcggttcgtgctgccctgcatcggcaccatgctgttcacctccatctacggcatcgtggacgggttgtgtgtctccaactttgtgggcaagacggcctttgcggcggtcaacctcatcatgccgctgccgcagctgctgggcactgtcggctttatgctgggcaccggcggcagcgccatcgttggcatcacgctgggcgagggcgaccccaaaaaagccgaccgctattttaccatgtttctgctggcagcgctcatctcggtcagtgtgctggccgtgctgggcatcctgctcctgcgcccggtcgccgagctgctgggcgcaaagggagaactgctggactacgccgtgcgctacgggcgcatcctgatgctggcgctgccgccctttgcgctgcagaatatgttccaaagctttttcgtcaccgccgaaaagccgcttttgggcttctggttcaccgttggtgcaggctgcaccaacatggtgctggatgttgtgatggtgggtatgctgcactggggcgtggagggcgctgccgttgccaccctcatcagccaattggtgggcggcgtgctgccggtgttctactttatcgatcacggcaataccagccgcctgcacctgtgcagaacacagttttacggccgcgtgctgtgggatgcctgtatcaacggttcttctgagctgatgaccaacctttccatgtcgctggtcaatatcctgtataacttccagctgctgcggcttgccggcgaaaacggcgtggcggcttacggcgtcatcatgtacgcggccttcctgtttgtggccgtgtttgtgggctatgccgtgggcagcgcacccatcgtcagcttccattacggcgcgcgcaaccatgccgaggtgcataacctctaccagaagagcctgcgtctcatcgccgtggtggctgtgaccatgacggcggcgtccatggtcatcatcccctatgtggcgcgcatctttgtgggctacgatgcccagctgctggcactgaccagccgcgcgttccggctgtatgcgctgagcttcctcatcatgggcttcaacgtgtatgcgtcctccttcttcaccgcgctgggcgatggcgtgacaagcgctctcatctcttttctgcgcaccctgctgttccagctggccgcgctgctcctgctgcccgccctgtggggcattgatggcgtgtggctggctgtcaccgccgccgaactggccgcgctggcggtgaccgtggcgatgttccttacaaaggataagacgttccattaccgaaaggcgtaaaacaaaaaagaagcacgcggctgcgtgcttcttttttgtttattctgctatacacctcactccgctgcaagtcggacaaagggcgcgatggcgttggcgtcgccgtggcggacgatggagtaggtgatatcgcagtagggctggatggcggtgctcttttccacggtggagatgagcagcacctgcaattgcaggcggcggaacagttccatcatggggcggatgcggtcgctggtcatcttgctgaaggcttcgtccagcagcaccagacggatgctgttttcgctcttctggtaaatttgcagaaggctggcgcagatggccacatagaagggtgcctgattctcgccgccggaggaatcgcggctgacgcgggaaagatacgcctgctgcccggtgacctgattggtcaccttgatatcgtaatccagataggtgcggtagtccacatagtccgaaagggtggcaccggcagcggtgcgtccctcctgccgggcgcgggtgttctcgtccacgtctgccatgatcttttccatcagttcgtccacctgacgctcgtaggcggggtcggcggtggcggcaagattgtccagagagtcgccctcggtcatctgctggttgcccttatccacgatgacctgatagaacgccgccagctgcgggtcgcggctgggttccagctcaaagcggtagacctcctcgccgtaggtcagctgttccatgaccttgttcagctcccggaactgccgccgggcgttgaagatatcgtccttcatgcggaacaggatatccttgcggaagcggtccttgcagtcccgctgcgcctgctccagccgggcggcgtagcgctccaaatcgatgcgcacaaggctctcatgctgggcgcggtactgctccagcccggcaagacccaaggggtaatcgcagacgtagcgctggttgtattcccgctgcgccggttccagggtgctgttcaggtagacggtcagggcatcgtccagcttggcctgtgccttttcggcagcctgcgcggcggcgcggggggatttgtccggcccggtcagcgcctgctgacggctgcgggagaggggctccaccagcgggtgggcggcaaagaaactctctgcggcctgtgcgctcttttcggcggtgtccaccgccttttgctgctccgtctcgcaggaggagatctgtttttcgcacacgcgcagatcgccgccggtctgctccacggcggtacgggcggcttcccatgcggcttcgcgcacctcttcctccttatacagctgctgcaaaagcggattctcgcgacactcggccagctttgccgcctgctcgtccaccgccgcgcgggcggcggtcagggcggcgcgggcgtcccacaaagcggcaagttcttccagcgtggtgccgcgcaaaagggtctggtactggctgtatgcggctttcaggttctgctctgcctgtgcggcggcgcgtacctcctccgcaagggcgttcatctcccctgccagtgctccggcgcgggcgcggcgggcttccaagccgatatagcgctgcggggtgcgcaaacgctccaaccggaaggggtggtggcgcaaaaggtcgcgggtggcgctgtcggggtagttttccagcgtgtcgggggtgtcgcagcagacgatgcggcgcaggatggtgtcggcgtactgcgcggccagcgggttttcgctggtgacctgtgccgccagactgtcggcgggggcggtgtcggcgcggcggttggccttgcgcagacccggggtgtccagcaggctgatgggaccgactttctctttcagcgccacaaaagcgctctttgcggcggcatagtgggcgggaggcacaaggatatcgaaccggcggtcgcccagacaggcttccacgcagtcctgccagctctcgtcctccacgttcagcagctcgcagaagatgcgggcgtccggctccatgccccggctcttcagttcggcgttcacggcgtcccgcacccgggtggcggcgtccccgtgggggtacacccacttgccgccggacacggcgtccagctcggcgcgcttctcggtctgctgccgctgcaaggcggcggtgtgctgccgggcggcaaaataggcttcttccagcggcttttcctgtgcggtcagccagtcggtcagggcgggcagggtgtcgggggtcaggtctgccatcttctgcccggcggcaaaaccgctgcggcgcagcacagccagcaggttgccggtcttttcggcggctttttcggcggtatcggcgcggcgggcggcggcatccagtgcggtctgccggtgcgccagctcctcgctgagagcgtccagtgcgcgcccctcgccgctggcaccggcggcgctatgggcggtcaggtaggcgcggcgggcttccgcttcggcggtcttggcttcggcgtagcgggtgcgcagcgtttcctgctggcggcgtccggcgtctacccgctcctgccagacagccttttccccggcatcggcagcagcccgcgccagcagggcggcgccccggttcacaagggcttcggtctgtttttcggtggcttcacggccatagcgcacgatctcgtccagcgcatcggcgcgggtctgggcttcggcaagaacggcgtgcaggttttccagctccaagcggtcaccctgcaaggcttccaagtccagttccggctggggcaggatgtactggtacagaaattcccggaaattcgggatctcgtccatgctggtgcccatctggaacacctcgttgaactttttgcccagcgggctggctgcgcgcccgatgcccagtgcgcggcatattctgtcccgcgcttcgctggggctgcgggtgtaggagagccgcccttcggcgggcttgaagtcctccttggcgctgggcgcaccggtgcgcgggtcgataaagggcagctgctccagcgtgatgccgtcctccgagatataccacgtctggtcgccggggtgcagctcctgcatggggccctcggactccacccgcactgcgatgacaaagctggtgtgctttacgctgtcccagaactctgccccgatatacgccacggtatgccccgggcggcggtaggcgttttcgccgcgctgcttggcgtggacagagccctgcagggtgcggccgctctttttattgcccagcgcattgaagttgcggttggtggtcaggcagtagcggatggcgtccagaatggtggtcttgcccacggcgttcacgccgatcatataggtcaggcgggcgcagtcgaaggtggtattttcaaagttgtgccagttgataagtttcaggcgcttgagttcgatcatgcttcaccctcccctgcttccatgtctgcgccctccgggcgctcgtacaggccaagctcggtgcgggtgcgggcgctctcggcggcggcatccgcaaggtcggcatccggcagcgccagcagcaccgtggggaacacctcaatgcggctgtccagcccggagagccgtcccaccggacgcgccagattgtaccggcgcagggtgcgcatgagcttttccagcgtttgctgatccagcttgcggggcaggttcatcttttgcagctctgcctgcacctcttctacggtcaccagcacctcgtccgcgctggcggcaaggctttcccgcttttgcaggtacaaaagccgtagcaccagcagcaaaatgctctcgtacttgagcagccgtgcctgactgccctcgtgctcgttgaccagcgccgccgcctgcatgggtgcggggtacaaaagcaccgcgtagcccaagggcttgaacaccgcacgcacctcgttgaggtgatcctgaatatatagatattttgcccgctgttcctctacgcagcccagcacgaagcagtggttgagcagatagtttgcggtctcttccagcagatcaatggttgccatccgtgtttacctccttgcggcgggtcaggacaaaatcctgaaaccggaagccgccgcgctccacccagtttccggtcagggtgatatcatactcccggtgcggcgactgggaataggtgtgcaggccgatgatgcctgtaaaatcgttcgggtattcctccacaagggtggaagcgttcacctgcccgcgggctgccagtgcctgccgcgccagcagcgccacgttttcctcggtgacggcaaggcgggcgtaatccagcagcagctgctgctcctgccgcagccggtcggggtcaagaggttcggtgcgcaccggggcaagaggcgcttcggtgcggggcgcggcggggggatacagcggctttgcgccgaacactgccgccgggtacaggtgcagccgcgctgccaccgggccatcgtccggctcaaacagctgctccgggctgcggatgtcctccgcatagcggcgcagcagggcagtgacgctgccctgcgccgagcggtcgctcagcagcaaaaattgtgcccgctgcaccgcacgcttgcggtagcggatatggctggcgtcgatctccttcatcagggtgctcatctcctccagcgcgtcccgctgctgctggatgagggcacgcacccggggtgcagcttcgccgggggcgcagcgctccacccgggcgtaatccagcgctaagcgcggcagctggttctgctcgcagtcgtccagctcttcttccagataggcgcggtaattgaacaggttatcgctggttttaaagcggtggtacgccgccgccaccaccttttcctcgtactggtcgaacagctccagcacctcctgcggggtgcggttatgggtaaggcggtcgatataatgcccgatggaagcgttgagggcgcgcagagacttgttcaaagtctcaaggtctgccgccacctcccgcagcacgttctcgtaggggcttttttcctgcccgatgctgcccagcagctgccacgccttgtacagcttgccggtataggtgaccacccgggggttcaggatctcttccagcgcatccagcagcggggtgacctccggcataaaggcaaaggtgggctccgtctcgtagctgccgggctgctcctccagccagccggtgcggcgcagacgcagcaaaaagcccactgccagcgtgtgggggtcgcgggtgggctgctcgtcctcatcgcccgcaccatcggcatccagcgccagcggctttgccagcgcggcaaaataatcctcggcacgggagacggcttcggcgcgggaaatgctgtaatctgccgtatggcggcactcttcccagagcagcagcaaaagctctgcataaaacgcccggttgggccccgccagcgggcggaacagccgtgggctgaccagttcaaacagctgcatggaaacgtcctttctgtgtaagttcgatacccttttattgtaccacagcgggcggggtttgtcacaaaaaggcgcaaaaaagcccgccgggcaggcgggctttgggagcgtatttcatcccagcactttgaggggagaattttccacccatagggtatcgtccagcaggcgggtgaccgcaaggcggccattggcggtgacccgggcagggtcaagggcgtagaagtcgctctcggtcaggttttccgggtcggcggtgggcgagatgcccgccacgcacacccagtggccataggtgctgcttgtggcaatgtgggggtagttcaccgcgtcccagccggaggaggtcaggtggtattcataagtagaggtgcggtttgcgtggcgctttaccccgctgaccgtggtatttttcaggtgcacgatcaccggacgcccggcggcaagctcgttgtacagctttttcaggcactcggcgcgggtgccggcgtaccccgtgtagcccgcagcggaccacaccgcaccgtttgaccacatcccgctgccggagcagaccttgccgtccagaatggtgcgggcgtagcgcagtgcgtacaagctgcacttgccggaggtctggttgccaatggaaaggatgtggctggtgtcaaagctgagcagccggatgccgtttttctccttcagctcagcggcgtgggcacggggcaaaaaggcacacagcagcaaaaccagcgccagaactgccgccgccagccgctgtgccgcgcgggcgggacagtgttgcatgggtacttcctccgagttcgtttcaatctggacatgattttaccaccaaaacgtggtgaaaatgtgtaaaaaggcaaaatagaggttcgacacaacatatgtccaaatttaagtatttccgtgcccggcaaagccacgccgccggggcggggacaagggcgtttgaaaagttgtcgacaaaatcagcctgaaaatataccagaactgcaacaaacccgacctgttttcatcctttttcacgaaactgtttcaggaagtttagctatattcccgattgacaaaaccgtcaccggtcggatataatcagggcagaaaggcgacaacggttgcgcaaagtctttccgaaaaaagaaacataaccacaaaaagctgattggagggatacccttatgaagaaactttcaaagatcgtcgctctgctgcttgcaggcgcaatggccatgctgatgtttactgcctgtaccggcggtggcggcggcagcgaggataaggaagccgaagaaaaggtgatgagccagatccgcggcaagagcaccagcaccgcaagcctgcagaatgatagtgatctgaagaaggtcgctgcagcccatctggatgaggatctcaagggtggtatcagcatctttggtcatgaactgatcggcaaagttcacgttgaaggcaaggacaaggaatacctgaccatcactgtgaccgcaaactacacctacaccgatacgatgctcagtgccatcctgacccagatctccaagaaggtatcgactgatgccaatgtggatatccagcagagcggcagttggtctaaggtcggtgtcgttgtcaagacaagcaacaccaagagctatgtcggcatcgcattccagatcaagaaccccaacccccagaaataaaagagtgatcagtcctttcgttccccggagagcaatcgccctccggggctttttgcgccttgtacccgctcagtcacgccctttggtcgcccctccccgtgaaaaggcaatgccggaagatccacagatcttccggcattgcaaatttagaataatttttccgctgcttatgcgcacagcacacgcggcgcgcattttaaatcgtcttttttaatacccctttaccgagaacccgcgctcccacgggtcgggcgggatgtccttttggcggatgccggtgatctggatatagtcgcttttctggatcatggcgaacagggtgagaaatttgtccgggtcgccctgcacttccagcgtcacgctgccgtcatcctcgttctgcgcccagccggtcaggtcaagggtctgcgcggcgtaccgcgcacggtagcggaagcccactccctgcacctgcccggtgatgatgtagcgccgccgcactgtgccttccggcagaacgggcggggtgcggtcctttttggaaagaaaatcaaacattttgccctccgtgtgcttttctggaaagcctaccccttccgtcatcgctgacgcgatgccacccgctccccactctgtcgctaacgcgacatctctccccggccggggagagtctgtccaaggggacggcttcagcggcggcgggaaactttgcgacattgccaaaaggcgcccccttgggggagctgtcaccgcaggtgactgagggggttttccccttctttacagctcctgataagcggtcatcaaagcggggatgaactgctttttgcggctcaccacgcccggcagcgtccagctggcatcggcggcgggctgggtctcaaagccgtcggacagcacctcggcggcatagcgtccgttgcagatgaccacgctctcctccttgggcacgtcggtcagcagcatatagatatcttccacgttctgcttgttgcgtgcttcctcgagatacggcttcagcagcgcctcggcggcggtcaggttcttgcgggtcatatagctgccctgcgccacgccaaagcggatatcgccgcacatgaacaccttgaagtcctgcaaaaagacctcttcggcggtcttgccgtccagcttttcgccggcttcaaacatttcgttggcaaactcgttgatgtccaccccggcaattttcgccagacggttggcggcgttcacgtcgatgggggtgcaggtggggctgcggaataccagcgtatccgacaggatggcggccagcagcagaccggctgtcttttgcgggatggtcacgccgttttcatcgtacatctgggtgacaatggtggcggtgcagcccaccggctggttgcggaagtacaccgggccgctggtctccagactgccgatgcggtggtggtcgatgatctccaggatctcggcctgatcaaagccctccaccgcctgtgtggcttcgttgtggtccaccagaatgatgcggcgcttgcgcaggttgatgatgttgcggcggctgatcatgccgcagtacttaccgtctgcgtccagaatggggaaataccggtggcgcacctttgccatcacgcgggtgacgtctgccaccgggctgacgagggtgaatttaatgatatcgtcccgggtcatgtaataggagatgggcgcacactggctgatgagctttgccgccgcgtaggtatcgcagggggcgctcatgatggctacgccggtctcggcggcgatatgctggatggtgcggcccacctttgcgccgttgcagatgatgatgagagaagcttccttctcaatggcgcagagctggctttcgtagcggttggtcaggatgacgatatcacccttttccatgctgctttccagcatttccggggtggcggtgccaatgcggatgtgaccggtggtgcacactgcgtcctcgctgcccaccaccatggtagcgcccagcgtttccagaatattgcggtagctggtgcggctcttggcaaggatgctggtgtcgaacagatccatgttggcggtggcgatatccttcaccgtgatgacgccctgcagttcgtcctcctcgctggtcacggggagggtatcgatcttctggtcgcgcatgatctcccacgccttgcgcaggctggtagagccggagatgccggggatctggcggtaatccacgtcccggatcttagggttgacgtcggtgcacatccggggcggcgtgaccccgaactttttcagcacaaattctgtttcctgattcatcttgcccgcacgccgggcttcgcagaccagatcactggtcttgtttttcagctctgcataggcaatggcagagcagatggagtcggtgtccgggttgcggtgcccgatgaccacgaccttgtgcgcagtttgctgcatagtttacccccttatgggtctttaccttcttatcatttaccaaaacagcgcccctctcctgcacagcggggcgggctgcaaccttattttaacacaactatgtccgggggtaaagggcaacaaacggcttgacctgaccggcaaattgctttaagcttatagaaaatattgctgatacggaggaatcccccatgaaaaagctttcccgcctgctgcttgtcctcggccttgcgctgtgcataagccttaccgcctatgccgaggatgcgcccgccgcccagcccacagccaaggagccccgcaccctgaccgcccgcaccggcaccgagacctcgctgtggaacgcctacgccttccttgcccagcacggcacagcctaccgctttgccccctgcgcggtgcagaccccggcagatgccgccggtaccgcccctgccgaggatgccgtggcggtgctgcggctctacaccacctatgtggaaaaggatacgcccgtcaacattgacggtcatgtgtttcttgcggtgaccaacaacactgacgccgaccttgcggtgggcgggctttccattgcgccgggcaccagcattaccatgggcacccggggcaacaaccgggagcacgccgggctgtggtataacatcgaaagctataatacgcactatctcccggatttttatgtcaacctgacctgtttgcagctgtccatgaacgcagagcagctggcagctgtgaacgccgcccttgccaaggcggacaagtggtcggcatggcacaactgcgccgcctttggcgcggcggtgtggaacaccgtgtgcaccgacaaggtagaccccggcaccccgcctaccccggcaagccttgccgccagtgtgcgcagctgcaccggcaagtggaatgctgacccggcagtgccctttgactacgttgtttactacggctaccctgccgtgcccagcaaagaatttgcctgagcagaaaaattattgtatacaacacttgcatttcgacagcatccgctgtatgataggagcattcgagctttttgtcatttacaacggaggacagcatgaaatcgtccaaattcacatccactcccctgtttccacggcaggcgctggtggcgctgctgctgccgctgatcgcggagcaggcgctcagcgtgaccattggtctggcagataccctgatggtatcctctgtgggcgaagccgctgtgtccggcgtgagccttgtggacagcttcaacaccctgatgatccagatcatgagcgcactggccaccggcggtgcggtggtcaccagccagtacatcggccatcaggagccaaaaaacgccaaggcggctgctgcgcagattttattcgtgctgtccagtttcagtgtgctggtggcggcggtggtcatcggcgggcggcacgccatcctgcggggcatcttcggctccattgacgcggacgtgatgcactacgccgagacctattttctgctttcggcgctgagctaccccttcatcggcctgtacaacgccggtgcggcgctgttccgggcgcagggcaacagcaagatcagtatgctgtccagcttggtgatgaacgtggtgaacatcggcggcaacgcggtgctgatctacggcttcggcatgggggtcatgggcgcggcgcttgccagccttgtgtcccgcgccattgcctgcgcggtggtgctgtatctgctgcaaaagccggactgcgccctgcgggtggacagcctgcgggcaatggcaccgaacggcgggctgatccggcgcatcctgcgggtgggcatccctgccggcatcgagaacgggatgttccagatcggcaagctgtcggtctccagcctgacctccacccttggcacggcagccattgccgccaatgccgttgccaataccaccaccacctttttgaacatccccgccaacgccgtgggcatggctgccctgaccgtggtgggacagtgtctgggcgcaggcgaaaaggaacaggcggtgtactactcccgccgcctgatgctgaccgcctactgcggcgcgtgggtgatgaacctgtcggcgttcttcttcgccaaccggttcgcggtgtccctgttcaacctctcgccggaagcgcaggccatggcgctggacatcatggtgtggttcaacatcgtttccctgttcgtgtggccgtccagctttaccctgcccaacatcctgcgcgccgccggtgacgcccggtttaccatgaccgtgagcatcgtgtccatgtggacgttccgggtgggcttctgctatctggcagtgctgtgcttcggcggcgggctgctgagcatctggatgggtatgtatctggactgggtgttccgctcgctgtgcttctatctgcgcttccgccggggcagctggctggagcagagtgtgatttaaattttttagcatccacccctttcccggtctgtaaagaccagcgaaaacggggtggattttttctttttgcaggaaaccgccgctttgattcgtattatcagcagaagattgctggtattttttacaggttccacaaattattttttcagcacttgacaaagttttcacctttcgttcttgcaatcttcatcgttcgggcgtataatttctcaatgctatcgagttctgctcttctgcaaaaggaggctattctatgaaacgcagctggcttgcgcgccacccggtcgggttcatggcgctgtatactatattttatctttccgtctttcactatctggagtcaaacgtccccctgcgcagcattctggtgcactgccgtctggacgatctgatccctttctgcaaatatgcggtgatcccctactttgcatggttcgtatggatccccttcaccctgttctatctgctgtggaaagccccgcgtgaggacttctggcggctgtgcctgccgctgttttccggcatgaccattgcactggcctgctacgccgtgctgcccacagcgctggacctgcgcccctactgggtgccgggcagcgatatctttgcgcagaccgtgcgctttttgtaccgcactgacaccgccaccaacgtctgcccctccatccatgtattcaactcggtaacgctgctgctggcgtactaccgcagccgcatttttgatgcaccgcgccgccgctggatgcgtcccgcagccgctgtgctgtgcatttccatcgtctgctccaccgtgctgctcaagcagcacagctgcatcgatgtggccttgggtgcgctgctggcactggcgctggacaccgcctttaccgccgccgagcgcagccagctgccccaggtgcggagagcctaagaaagaaagaaaaaacgacccctgtcagcgcctttggcgctggcaggggtcgttttttcatttcctttttcagaacagcccctcgggcaggcagatatcctgcttggggacttttgcccacgcaaagtccggcacaaggctttccggggtgcggggcgcgggctccgactgcaggccgtaggcataggcaagcttaccgatgatctctggggcggtgtactttgcccgcagattttcaaggctctggtcgccgtcccgcttggacagccgccgcccgtccgccgccagcaacagcgggcagtgggcaaagcggggcggctgcaagcccagcagccggtacaggtacagctgccgcgccgtggaggacagcaggtctgccccgcgtaccacctcggtgacgcccatgcgggcatcgtccaccaccaccgccagctgataggcaaacacgccgtctgcccggcgcagatagaaatcgccacagtcccgcagcaggttttccgtgtgggtgcccatgcagccgtccgtaaaggtgatctcctcgtccggcaccatcaggcggtaggcaggggctttctttttgcgcttttccgcgatctcctccggcgtcagcccccggcaggtacccgggtagatgacgttgccgtccgaggtgtggggtgcgctggcggcgtgcagctgggagcgggagcaaaagcaggggtacaccagccccctctgttccagtttgcggtagctttcggtataaatctccccgcactcgctctggtaatagggtgcgtgtgcgccgccggtgctgccgccctcgtcccatgtaagccccagccacgcaaggtcctgctccagcaagtcggcataaacgcgggggcagcgctcggcatccaagtcctcgatgcgcagcacgatgcgcccgccctgactttttgcgctgagccacgccagcaggctgcacgccagattgcccagatgcagccgtccgctggggctgggcgcaaagcgcccggtgaccgggcgtttttgggatacagggacttggttttgcatgggtgtgcttcctttcacttttactggttttttctcattataagcccttgctgtgcaaaggtcaatgcgcataaaaaagccgccgcaggcggcaatgcctgcggcggctgtaaggtcggctgctcagtgcagctccggccagtagcccttgttggcttcgatcatatcgtccagaatggcctttgcaacgctcatgctgggcacagtcttgttcagggtgaaggcctgcagcaccttctcgtagctgccttccacgcagccctctaccagcagcttttcgctgttgagctgctgcatcatcaagccctgctggaacagcgggatgttgtcccgggcaatgacctccgggccgtttttgccgatgtaggcgggcagctccaccattgcgtcatagggcatattggggatagcgccgcggttctcggtgatgatgaggaagcgtgccttggtgtcgttcttcagcgcagcggacagatctgcgatccagtcgccgtggctgccggcatagaaggtgttggcgtccacctcgccggtcttgaggtagtggtcgatgccgtcgaacaggttcttttcgcgggtctcctccacctcgttggcgcgggtgtggttcgggtccgagtgctccacgaactccttggcctgcagatagtagttcaggtaggtgttgggcaggtactccgggaagttttccatgatctcgtactcgcccttccacacatagtaccagctgcccttggtgtggcggttctggctgctggaggaagtcagggcgcccatgcccttgaggtagctttccggcagaaggatcttgttctccttgatgtaggcgcgcagcttgggcatcagatcctcgccgtggtactggatggaggtgaaccagccgaagtggttcaggccaaagtaatcgtagacgatctccttcttgttctggatgcccatggcggctgccaccacgtcaatgatggcgatgggcatatcgcagatgttgatgatccgtgccttcgggcgcagcttgcggcaggcttcggatacgatggcggcggggttggagtagttcaggatccagtagtccttcttggcatacttttccacgtcgtcgatcagcttgatcatggggaagatggtgcgcattccgtaggccatgccgccgcagccgcaggtctcctgtcccacgcagccgtggcgcagagggatcttttcgtcctgctcacgcatggcgtagccgcccacgcgcatctgggcaaacacaaaagaggtgtcagtgtaagcctgctgcacatcggtggtgaccaccagcttgatgtcggtattcagctccttatgcaggacccagtccaccacaacggcaaccttgtcctgccgctccttgttgatgtcgaacagacggatctcgtccacttccagttcttcccggcgcagggcgatggatttgacgataccggcggtaaaagtgctaccgccgccagcgatggtaatgaccatagttaaacgctccttttttgtatttttcaggttagcccggcgcagtccgccggggcacggaaaagcggtttactggttttccagctgtgcttccacagcacgcttgatatcggctacctgcagaccgtaaacgatctggatatcggtaccctttttcacgatgccgctgttcggcagtttgttgatggcagcttcgtccagctttgcggggtccttgatgtttacccgcagacgggtgaagcagttgtccaccgacaggatgttctccttgccgcccagaccgtcgatgacacactgcacctcggcagcgttcttcacgcttgccttcttggcgggtgcaccgctccccgcggtctcggtgctcacctcttcccggccgggggtgtgcaggttgaacgccttgatcagcagggtgaacaccacaaagtacactgcgatctggcacagcgccagcaggtacagggtgggatagttggtcttatctgcaccggcagaaaggttcatcagcaccgagccgaggaggttggtggtaaagccggtgacatggaagatgtgcagcagcacgatgaacagaccggagatgcaggcgtgtgccacccacaggatgggcgcagtgaagcagaacatgaagtccagcggctcggtgatggaggccagagaggcggtaaaggccagcggcaccagaacggcagcggtctttttgcggttctccttgcgggcgcagaagatgaaagccgccacgatgccaaagtagccgaaggtcttggtgaagccggtgtacatccacacgatgccgtccgagaagggcagacccatgctgtactccatcatcatgacgatgtaggagccggtgtaggtggcatcgcccacggtcaggctgttgcccagtgcagagaactggaagggggtgtagatgaggtggtgcaggccggtggggatgaggaagcgctccaaaaagccgtacaggaacaggccgaagttgccggaggtggcgatcaggtcggtcagtgcgctgatgacgttctgcaccggcggccagaagaagcaggagccaaagccgaacaggatggaaaagaccaccatgcaggtaaaggaccagcggttgccggagtagatctgggtgatgatgcccttgaactgcttttcacaggtgcggttgtacacccagccgcagaccaggcccagcaggatgccgccgaacacgcccatatccaccgtctggatgccgaacacggtggactgaccggtgccgtacagacccaccatcgggtcaggctctgccagcatacccagctgagtcagggtgacgttgccggcggtcagatacataaagtagctcatcaggccgatgatggcagcctgctgcttgttctttttggcaagcgccgctgcgatgcccacgcagaacatcaggctgaggttgttgatgatgaccatgatgcagttgtagatcagctgtcccagcagcttgataggggtccactgcagaacggggatcatcgcactaaggcttgtgctggtaagcaatgcgcccagcacaaggatcaggcctgctgccgagatatacgacagcggtgagagcatggctttggagaacttttccaagccattcatgactttttctttcatcgtgtaatactcctcactttttgacttgactgttttgggggatgatttctattccgcagggcttccggacgccctgttgaaacattttaaccaacgatcttggtcaggtggatgagcagatagacctgctcctgatgatccagctcgtaatcaaattcctgccgcagataggcattgatgcgctgcaagcacacctcgttgcggctgtcgcgctgcaaaagcaccgtgtacatggattccagcccggcgtcttgccaaggagtgtgccgcaggatgcgcgccgccagaaacttgaggtgtacggtcaggcgggtggtctcaaggctttcttcctcaaaggtacagtgataggtatcgcagatgatctccttgaccgccttgacgaactttacggtatcgtaggccagcgcgccgtccgccgcaccggctaccagatgcagggcaatgtagcccgcttcgtcctccggcagctgtacgccgcagaactgccggacaagttccagcgccctttgccccactgcgtactccttcgggtacagcatccgggtctccgagagcatgaggttgggcagaaaagtgcccttttccacacgttccagcgcaaagctgatatgatccaccagcgagatggtgcttttgctgctgagcaggatgccctgctcctctgccgccagcgagatgcgctcggcggcctgcatcacctgcggggtaacgttatccagcatcttgaggaacttggtctgcagctcgttctgcacatagtacaccttggaaacgcggtttttgtcgatcacgtcccccgggcggcggccaaacccaagcccgttgcccacgagaatggcttccctgccgtccggcatgaccaccgacaccgcattgttattgaatacctttacagcctgcatcgccgcactcctccgcttccatgccgcagcttttataaaaagaaaagggcacaagaaccaaagggatgccgttgccgccttccctctgatgctcatgcctgatcgaacagttacacgcactgataaattcacttgtctgcttttgattatacgagccagcacggagaatgtcaatgcgttgaactgcccgaaattcaagctgtatttttgtatatcctgcacaggtgctgcttgaaattcgtcctgcgcagaacgattgacaacgccgtgcgcagaacgtatacttagggtgtagatcccgctttgctccggcggcttgccggggcaccagttacggaggtttttcttatgacatcgaaatatatccgtccccttgcgctgctgctgtgcgccgctttgctgggctgtctgctggcagcctgcggcggctctgcaagcagccccgcatccagcgctgcgcccgcttcggacagcgcatccgcttccggcagcagtgagctgccttcctccaccacagaagccaacaccggagagctgaaccccggcaactttgacgagaactcggtgttctccatcaccggcacctcaaacgcctttgcgccctgtctgggctgggggcccggcgtatccggctgctccttgaaatcggtcatcgcggcggcatcgctgctgcactgggccgaggacgcacggatgtccagccgctccccggaagccattcaggaagccttttacagctggtacgacggcctgaccgacagccagcaggagggctttgccgaagcatggccgctgatcaaggacgccgcgctggacctgctcagcgataaggacagcatgaccgaccgcatcgcagatgcagggctggacgctgacaccctgcccggctgcaccctgaaaaactggcaggcgctgcaagctgtgctggacggcattgtgccggagacaaacggcgaagcttaataaaacaaaaaagcatctgcaaccatcgcttctgaatttcagaatcagcgattttgttgcagatgctttttctttagcgggctcgccctctccgtcacctacggtgacacctctcccaaagggagaggccttggcagaaagatgaagtctgcgtggactgccaagggctcccactttgagggacgacttcccccggtcgggggaagatgtcgcgcagcgacaaaagggggagtctggcatcgcgaagcgatggctgagagggcgaggatgctgaccatgtgcagcatcccttctgtttctgatttttatacctttttcagcacatactggcgggtgcccatacccaccttctcggcctgttcaagggtggccttccactcgatgttggggttggagtccttgaagttgtcgtggtagcagttccagcccggctttgcaaggttcgtgctcagctggctgttgggcagcggggcggcgttcaggcaggcgtccacgcaggcctgatccagcgccaccgggtcgaaggacgcaaagatgccgatatccggcaggatgggtgcatcgttctcaccgtggcagtcgcagttggggctgatgtcctgcaccagagaaatatggaagcagggacggtcgtggcagactgcggcggcgtactcggccatcttgcggtccagcagctcgtttgcgcagtcgttgggagaatagatggcgtcaaagctgcaggcgccgatgcagcggccgcagcccttgcacttgtcgtagtcgatgacagctttgttttcggcattataagtaatggcatccgagccgcactccttggcgcagcggtggcagccgcggcacagcccctcctgcacggcgggcttgccggcggcgtgctgctccatcttgcccgcgcgggagccgcagcccatgccgatattcttgagcgcaccgccgaagccggtggactcgtggcccttgaagtgggtcaggctgatgaacacgtctgcatccatgatggcgcggccaatttttgcggtcttgcagtattcgccgttcggcaccggcacttccacctcatccgtgccgcgcagaccgtcaccgatgatcacctgacagccggtggtcatgggccagaagccgttcagctgggcgcagctcaaatgctccagcgcattcttgcggctgcccgggtacagggtgttgcagtcggtcaggaagggcataccgccctgctccttgcacaggtctgccaccaccttggcgtagttggggcgcagaaaagccagattgcccagctcgccgaagtgcatcttgatggccacgaaccggccgtccatgtcgatgtccttgatgccggcggcaatgcacacccggcgcagcttttccagcaggctggtgcccaccggacagcggaaatccgtatagtaaactttggatgcttccatggtgtttttcctcccatatccttccggcggcgtctgccgcgcggtctctcttttgttcaggcaataccgcatgattccaagtgccgatacggcgagcgaggtgcggcagatgctaagccaaaagcgcagataatactttgtgtattatcgagcattttggcaacgcagatgccgtgccgcagccgccggaacggtgcttgagccgtcaggcgggaattgtgcggtactgccttcagtatagcacacccgggcgagcggtgtaaacagaaaatggagcagcgccgtttttgctctgcccattttggggttgacagccctgccctgcggtgttatcttatatcggttccaaaaaacggaacggatgtctatatataggagtactttctatgaacgattttgatacattctggcacgaagcgaaagccgccctgcgggtggcgctgcaatggttctttctggcggttcccatgggtctgctctgtggatttctgggcaccttgttccaccttgccgtcgagcacgccaccgagctgcgcgccgcgcagccctggctgctgttcctcttgcctgtggcgggtctgctcatcactgccctttataaggtaacaaagtgcgagggtgtgggcaccaacaacgttcttcgcgccgtgcagagcggcgagccggtcagcattctgctggtgcccgccatctttctgggcacggtgctcacccacctgtgcggcggctctgccggccgcgagggcgctgccttgcagatgggcggcagcatcggctggaaccttggcaccctgctgcggctgaaagaccacgaccgccgcaccgccaccatcagcggcatggctgcgttcttctctgccctgttcggcaccccgctggcggcggcctgctttgctatgatggtggaggatgtgggcctgacctttaccgctgcctttgtccccgcctttacctctgccctcctcgcctacggctgctcgctggcctttggcatcgcacccacccactttgccctcactgcaccggagctgaatgtccgcaccgccctgctggtcatcctgctgggtgtggcctgcgctgccgtttcccgcctgttctgctacaccctccacttcatggagcacactgtgccaaagcttctcccgaacccgtgggtgcgggtctttgcgggcggcgtgctggtcatcggcttttcctatctgttcggcgtggggcggtataacggcgcgggcatgagcgtcatcaccgctgccgtggagcagggacaggcactgccgtgggattttctgtgcaagatcttcctcaccgcgctgacccttgcctgcgggttcaagggcggcgaggtggtgcccagcttctttgtgggcgctaccttcggctgcgtggtcggcccgctgctgggtctacccgccgaatttgcggcggcggtggggctggtgtccatcttctgcggtgccaccaacgtcctgatcccctccatcctgctgggctttgagctgttcagcggcgccgggctggagctcatcgcgctgggctgcggtatctgctttatgctctccggccaccacggcctgtacagcagccagacctttgttaccaacaaactgcgctcggagtatatgtcccataagtggcgcgtaaaggtaaaaaaagcggaagagtgagctctcctatcaaaacaggggctgttgcgcaagcaacagcccctgttatcattataagcttttctcttatgccagcgcggtaatagccgccacagccagcacgatagcgcccagcacgatgcggtagatgccgaagaacttgaagtcgtggcgcttgacatagtccatcaggaaacggatggccgcaaggctgaccacaaaggccacaacgcagcccaccagcagcacggcgatctcggtgccggtgatggatacgccggaaaccgcgaacttgaccaccttaagcagggatgcacccgccatgaccgggatggccagatagaaggtgaactctgccacgcaggcgcgggagagccccagcagcagaccgcccacgatggtagcaccggaacgggaggtgccggggatgatggcaaggcactgccacacgccgatgagcagcgcgtcccggtagctgatctgttccaactttgtgacccggggcgtggtgcggcggttttccaccacgaggaagagcacgccgtacaaaatcagcatggcggctacggtgatgtagttatagaagtgctcctccatccagtcgtccagcgggctgatgaccagcaccggcagggtggcggctaccaccttgaaccacaggttccacacgctgggcttggagatgaccttgccctgccgcagcccaaagggccacagcttattccagaacagcaccaccacagccagaatggcacccagctggatgaccacccggaacatggacatgaactcttcactggcattgaacttgacgacctgctccaccaaaatcatgtgcccggtggaggagatgggcagccactcggtaatgccctccacaagacccatcaggatcgctttgatgatctcgaaaaacgtaataaatccctcctgcagcaccccgctgggtgcgttgttttttcaaaagcagttccagtataccatactatgagccgctgtgcatacagattatagaaattttaccggggtgagagcagttttgcgtgtaaagctgccgagtgaagccgcgcaaaaccctctcagtcacggcttacgcgatgacggagagggttcacgccgcgagaaactcccccagtctgctgcgcagacagccccctcggagatggggcctttggcatagtgggaaagtcaccggctaaagtgcaaagtttcccgggcgctgtatttatctgccccgggaaatgtgctatactataaaaataagaagtctgtccgctttctgcgcccggcgctgaaagctctgagaacaacgaggtgaaccttcatgaacatactggtgatcggctgcgatcaggtgggtgcggcactgatccgcgatctggaacgcatcggccatgatatctcggtggtggaaaaggatcccgagcagctcaagcgtctggatgcctttgacgattatacctttcacggcactgcccttgtgggcgaccccaccgacccggacaccctgcgccggggcggcgtagagaactgcgacgccgtggcggcggtgaccgaggaggactcggtgaacctgatggccgcacagctggcaaagaacatcttccgccgggataaagtcatctgccgggtgtccgacccgcatctgcagatcttgtaccacaaggcctacgagttggagaccatctgccccaccgtgctgaccgagcaggcggtgttccgggctctttccaagtaaaacagcctgttttcgctttacaaaccgtagaatgaggtaacgatatgaaagtttgtattgccggcggcggccgggtgggaatgtatcttgcccaaagcctgctgtcccaccaccataaggtgaccatcatcgagccgcaggaggcgctgtgccgtacccttgccgatacgctggatatcccggtcatctgcggcgactccttgagctttgacaccctgcgcaccgccgatgtggccagctgcgacgcctttgtggcggtgaccaacaccgacgagaccaatctggtggcgtgccagatcgccaagcgggagtttggtgtgaaccgcaccgtggcgcgcgcttccaaccccaaaaaccgggacatcctgcacacgctgggcgtggacaccgtggtgtgcggcaccgacaacctgagccatattctggagcgggagatcgagaccgacaccatccggcagctgctgtccctgggcggcggcactgccagcctgaatgaaattttgctgccggaggactttcagtttgcgggcaaggagatcaaggagatccccattcccggcgatgccattctggtcagcatcacccgggataccgagttcatcatcccccacggcagcacggtgctgctgccgtgggaccggctgctgtgcctgacacaggacgacaccctgcatctgctgatggatgcgtggggtctttcctcccacaaatgagcgagcaggagctgctgcgcaccgcgctggtgctgccgccccgcgcccgccgggtgctctgcgtctgggcagctgtgcccgggctggtctgcgcgccctttgccttctggcagagcgtgtgggcaggcgcggtcttttgcatcgtatgggcggcgctggtggcgcttgtccgggcgcgctgctgcagctttgtcgccgccctgacggcagacagcgtcacggtgcaggccggggtggctgtccctgtgctgcgccgcatcccgcgccgggcggtcaccggggtgcagctgctgcgcaccccgctgctgtgggcggcagggtgcaccgtgctccttgtgcgcagcccggggctgcaattggtgctgcccggcatccccgccgcacaggccactgcgctggcggcggtgctgatggagggcagtgtatgaaccgggaaaagcacttccacccgctggcggcgctgcatctgctgcgcaagaccctgcttgtgtaccttctgccgctggtacaggtgctttttgaccgcaactgggacgccctgcgtgcggcgctgcggcaggagcttgtgctgctggtgtttgtcagcgccgtgtgctgggcggtatactatggtggccgctggcaggtggatgccgagggcacagtgcacgtcagctggcggctgggggtgcggctggaccgcgccctgcgcgccgaaggtctggcagcgctgatgctggagcagcccctgctctaccgcttgaccggtgcctgccgggtggtgctgtaccccgtggggcagacacagaccattaccctatatcttacccggcagcaggccgaagagcttgccgatgtgctgctgccggtgacggacccgctgtggcacgcgcccaagggcggcgaaaagctggcctttacggtgctgggtgccaacggcctgtccaccctgtttttgtggtggctggccatccaccagacccagaactacgccccggacgcccagaccgctgcccttgcgcagctgggacagttggcggcgtttgccgcccgctggctgccgctgggcatggcgtggctgctggtgctagcgggcaccctgttctgcatcagtctggtgcgcagcgctttgcaggcggtgcattacaccgtctggcgcaccgacacccagctgggcagccggggcggatttatccgccggtacgagatgcggctgcggctctgccagctgaactacgccgacctgcgccgctcccccgccacatgggcgctgcattactgcccggtatttgtctcggcaggggcgtgccgcccggagctgcccctgttcgtctggcgggagggcaccccgctgctgcgggagctgctgcccgagatgacgcagctgcccccggacacccgcgccgacaccaccgaccgcagcatggtgttctttttgccggcgggcatcccgctggcgctctgcctgctgctgacggcggtatcccgcaccaccctgcctgcccttaccctgccgctgctcatccccaccggggtgttcgccgcgctgctgggcgctgccgccgtgggctggcaccgggagggcgtatggcagcagcagggacagctgctgctctgtcggcagcaccggttccatctgcaccagctgtgcgtgttccacccggacaccggctttactgcgttgcaatccccttgggcggtgacggtgcagcgcgccaacctgacccttgtatttcccggcaaagaaaaggtcacggtgcgcagcgtgccgctggcggctcttgattttctggagatatagaagtatacttgcgatgccccgctgaacctacggtcggcggggcatttttgtaacacagagcaacggagactattttatgataaagactgtattatttgatctggacggcaccctgctgaacaccatcgacgaccttgccgatgccggcaactgggtgtgcgtccaaaacggctggcccacctttacggtggagcagttcaaactgatggtgggcaacggcatccccaagctggtggagcgattctcccccgctgacgcccgcaccccggcgcagctggcggcgacgctggcgcagttcaccgcccggtacgatgcccacaaggaggacaagaccgcaccctaccccggcattccggcgctgctggacgcactgaaagccgagggcatccagtgcgcggtgttctccaacaaggccgatgcgctgtgcggcggcatcattgcccactactttggtaccggccgctttgacgccgtgcggggcaaccgcccgggcgtacctaccaagcccgaccccaccgggctgcacgccctgatggctgagctgggcgcagaccccgccgccaccctttttgtgggcgacagcgatgtggatatcctcaccgggcacaacgcccagttgcccgccatgggcgcgctgtggggcttccgcggccgcgccgagctgaccgccgccggtgcggatgcactggcagaggtgccggaggatatcctgcggtatgtgcaggagcggaataaataaataaataaataaaaacacgggaaggtctgcggatcttcccgtgtttttgcgtatttttgcggttcaggatgccgattccagcgggtctaccaccacaggacaggtctcgtacagctcgatggggtccaagtccacacagctgcccgggtcccggtcaccggtcacatcccatgctgcggtatcgttcaggacggtcaggcggcttttgaaaaaagcttcatcctgcaagggcgcaaagaccccgcccagtttaagcagcggctttgcgtcatacagacgcacagagccatcgttgaaatagaggtacaccgtaaagtcctcgcccgcaacagcctgcaagacctttgggaacattgtgacccgtatcccgcaaaataaactgatctccggcataacacatcccaccttttcaacgtaagtatatcgtatattttgaaaaaagtctatcctgtattatatagctaagattcccgtacgggtcttagcggcagcatccacggtagacattcctactgattggttcgattcccgtacgggtcaaattaaaaacgcccttgcgcgatgcgcaaaggcgtttttatgacccgtacgggaatcgaacccatgttacagccgtgaaagggccgtgtcttaaccgcttgaccaacgggccttacaaatacagagcttcgctaaaacctccgactttcatcgtccactactgcggacgaccgtcccccttatcttagcgaaactctgtaacgtggtagcggtaactggatttgaaccggtgacacttcgggtatgaaccgaatgctctagccaactgagctataccgccacatatttagcttgcacttgaacggtgctttattattatatccatagatgccccttttgtcaacacatattttcaaaaaattttgcagttttttgatattctcaatttatttacataggtgcgttgaaatattggttttcttgtcgcttttgcgggaaaaactcccccagtctcgctgcgctcgacagccccctctaggatggggcctttggcatagcggcaaagtttccggcttaagtgcgaagtttgcgggtacgccagaggctccctccccgagggagctggcaaagccgtaaggctttgactgagggagttaagctcccgctttcccacgcaaaaagcaccgcttccctgtgcggaaagcggtgcttttttcaaccttttttctgcccggatgtggaaaacccggtgcagttttagttcttcttattggtggggaccatgaccttcagcccgcccatgtacggctgcagcacttcggggatggtcacgctgccgtcagcctgcaggtggttctccaggaaggcgatcagcatacgcggaggtgccacgcaggtgttgttcagggtgtgggccagataggtcttgccgtccttgcccttgatgcggatgtgcaggcggcgtgcctgtgcgtcacccaggttggagcaggagcagacctcgaagtacttctgctggcgggggctccaagcttcgatatcgcagctcttgaccttcaggtcagccagatcgccggagcagcagttcagctggcgcacggggatctccatgctgcggaacagctccacggacatctgccacagcttctcgtaccagtcggcgctctcctcggggcggcagaccacgatcatctcctgcttctcgaactggtggatgcggtagatgccgcgctcctcgatgccgtgtgcgcccttctccttgcggaagcaggggctgtaagaggtcagggtcaggggcatcttgctctcgtccagcgtctggtcgatgaagcggccgatcatggtgtgctcgctggtgccgatgaggtacagatcctcaccctcgatcttgtacatcatggcgtccatctcggggaaggacatgacgccctgcaccacgttgccgtgcatcatgaagggcgggatgacgtaggtgaagcccttgttgatcataaagtcgcgggcataggccagcacagcctcgtgcaggcgtgcaatgttgcccagcaggtagtagaagccgttgccggccacacggcctgcggcgtccatatcgatgccgtcaaagctctccatgatctcggtgtggtacgggatggggaaatccggcacaacaggctcgccgaagcgctgggcttccacgttataggtatcgtccgggccgatgggcacgctggggtcgatcatctggggaatggagtacatgatctcctgaatgcgggcggacagttcctcctcttccttctccagctctgccatcttgtcggcgtccgccttgacggcggcgttgttggcgtcgatctgtgcctgcagctcagccttctgtgcctcgtcggtgcacttcttcagctgaccgaacagcgggccgttggccttgctcagcttgttgcgggcggccttcagggcctccacttccttcagggctgcgcggtacttggcatccttttcgatgacctcatccaccaacggcagctttgcgtcctgaaacttctttttgatgttttccttaacggcgtccgggttctcgcggacaaatttgatatccagcatgattgactctccttaactctattgggcttgcagcggtacacttgcggctttccgctgccgttcaaaggcggctgttcccgccttggatcgcatgattattcggtttccatctggtactgtcccagcaggtttgcaaaggcgcgcagctgctcgtcggagtaaaaatgcaccgtcagcttgcccttgccgccgtggtaggccacgttcacctcgctgcccagcacctgtttcaggctctcctccacctccaccggcaaagtgccgcggggtgcgggttcgcggggctccttggcgggctttgccatctttttgcaaagcgcttcggcctgacggacgttcagctggttgtccgcgatgatctgcgcggcttcggcctgcagttccggtgtgggcagacccagcaccaccttggcgtgaccggtattgataaaaccgcttttcagcagttccagcaccgtttccggtaagttgagcagacgcaggctgtttgccagcgcgctgcggctcttgcccagcttgcgggcggcctgctcctgtgtcaggtcgcagcgggtcatcagctcccggataccggcagcttcttccaccgggtccagatcctcgcgctgtaaattctccaccagcgccagctccatggcctgctcatcggacacatccttgatgaccaccggaacctcggtaagacccgccatgcgggaggcgcgccagcggcgctcgcccgccacgatgctgtaaccgcccatgggtcttggacgcaccgcgatgggctgcaataagccgtgctcagcgatgctggcagccagttcgctgagggtctcctgctcaaaggtcttgcggggctggtcggggtccggctcgatctcgcgcagcggcaacgtttccaccgctgcgtgctctgactcaaagaccggtgctgcgtcctcaaacagactgtccagcccgcgtccgagccctccttttcctcttgccattgtttaccttgttccccctgttttaatcttccagagcatttttcgccggctctgcggcgggtgcagcctttgcgcgggactttttaggttcctgcgggcggttgtgcttgacgaattcgattgccaagtccatgtaggcttcgctgcccttgccctttggctcgtagaaattgataggctggccgtagctgggcgcttccgaaatgcggatggagcgcgggatggtggtcttgtacaccttggagccgaagtacttctgcacctgctccaccacctgcacggtcaggttgtaccgcagcgagaacatggtgaacaccacgccctcgatatccagatacggattatactttttgcggatggtcttgagggtgctgatgagttctgacagaccttccagcgcatagtactcgcactgcaccgggatgagcacactgtcgcaggcgctcaggccgttgagggtgagcagatccagactgggcgggcagtcgataaagatgaagtcgtagtccttctgcacctcagccagcgccttgcgcagacgcccctcgcggccgggcagatcgatcatttccaagctggcaccggccagccgggtgttggagccgatgacatcggtgcggtactcggtgtgccggatggcctgcgccgccgttgccctgccgatgagcacctcataagtgcccgcttccacgctgcgctttgggatgccatagccggtggtggtgttgccctgcgggtcaaggtctacgataagcacctttttgcccagcgccgctacgcaggacgaaaggttgacggcggtggtggttttgcccactccgcccttctggtttgcgatcgctacaatttttgccacgcgcttttcttcctcccggggaaagatttgttccacgtggaacacgcagtcatgcccgccggtttccccgtccggcaggcaccttggcttctagtataacacatccaaattgttttttgaaccatctggagcgtttttcagctggatttttaacttttgggggtgggaaagtggaaaaagcgagaaaaatactcccccagtgtgctgtttaactttagcatcctcgccctctcaggcgctacgcgccagctctcccaaagggagagcccttggcatggcgggaaagtttctggctgaagtgcaaagtgcgcctaagcggaggtcaccccttccgtcatcgcctacggcgatgccacccgctccccactctgtcgctaacgcgacatctctccccggccggggagagtctgtccaaggggacggcttttagcggtggcataaagtttccggcatagcgcaaaggcgtccccttgggggagctggcacggcgtaagccgtgactgagggggtatctgccaaaactcccccagtctgctgcgcagacagccccctctgggatggggcctttggcatggcgggaaagttatcgggtaaattgcaaagtctccggtttcgccagaggctctccctttgggagagctggcaccgcaggtgactgagagggcgaggacgcttgcgggcggcacgccagaggctccctccccgagggagctggcaaaaccgtcaggttttgactgagggagttcgttcccttccctgttccacatggaacaattcacttctctgcggcggcggtggggatgcggacggtgtactcgatgtagccgtccttctcttcccggtgggcggtggcgggcacgccgttgtcggtcatcagccggatagcgtggtcgatggtgttgacaaagatgcgcacgtcccgcaccatggagatgcggtgcccggccttgggcgggctgttcagcagctgctcgatgtagctgtcggtctggcgggcgttcaggcggcgcttggcgatggtgatcagcgcttcgctgcggcggttctccggcaggcgcagcaccgcccgggcgtggcgctcggtgaggttgttgtccagcacaaattgccgctggtctgcggtcagctgcaacagccgcaacttgttggcaaaggtgggctgcgccatgcccagacgcttggcggcttcggcttgggtgcagtcccacagcaccatcacatcccgcagcccctgcgcctgttcaaaggggttcaggtcggcgcgctggatgttttccagcagacccagtgcagcggtgcggtcgtcggcgtagctgcacaggatggcggggatggtggtcatctttgccagctgacaggcacgcagccgccgctcccctgccaccagctcgtagccctctgccgctttgcgcaccgtgaccggctggagcagaccgttctcccggatgctctgcgccagcgccgtcagctcctgctcgtcaaagcttttccgcgcctgaaagggcgacgggtggatctggtcgatgggcagagagagtaatttcccggacggtttcttgcgttcaaacatgatgctgcccctttcctgtgaaataaaccttcggtttttccacatttctccgggaaatcgtggaaaacctgttcagcttcagtgtagcacacaaagaaagaccccgccagaaatttcgttcggcagggtcttacaggttgcgtcaaatcatgcgttatttcagcgggctttttgcaattttaccgccgtttctggggtatgctgtcggagtttgcgaaatctttttgcacaaaatcagcgtgcgggtgtcgccgccgggcaggtgcaaagtgcgggtctcgcggtactcgccgcccagctttttgatggcaccccgggcggcggtcagctcctcttccccggaggcgcccttcatggcaaggaagttgccgcccacttttaccagcggcagacagtattctgccagcatgggcagggctgccacggcgcgggcagaagccagatcaaactgctcccgccagatcttgcgggcagcttcctcggcacgctccttggcaaactccaccccggtcagacccagctgggcgcaggcgtacttcaaaaactccacccgcttgccggtgggctccataagggtcagttccagctccggcttgaagatcttggtcacgatgcccggaaagcctgccccggcacccacgtccaccatacgcccggctacttccggctggctggcaaacagcaggctgtcgaggaagtgcttatcctcgatgccctccgggtcggtaatggcggtcaggttgaccttctggttgtagtctacaaggatctgggcaaaggcatccagctggtccagctgggtgccggtgagggcaatgttccatgtggaacacttttcctccaaccgctgtttgtcgatcatagtgttttcctttctgtcgggtggttggggtagcgcaatcgtttgttttatcgcaacttcgtattatttttgttgctttcctgccagtgcgatgctcagctgcgccacatcggagggtgaaacgccggggatgcgccccgcctgccccagattgcggggacggatgcgggcaagcttttcccgggcttccagcgtcagaccggtcagagcggcgtactcaaaatcctctgggatgagggtcttttcgtggcgtgccacctcccggatcatcctgtcctgtcgggcgatgtaaccggcgtacttgatctcggtctccagccgctccgccagcatgggggtgatctcctctccccagccgatgatgcccgccaccagcgggtagctgatctcggggcggcgcagcagctcttccgcaatgccgccctcggcggcgggggcaagaccggcgacttccatggcggcgcgcaggtctgcggtgcgcagatgcgcttcgtgcaggcggcggcgctcggcttccaagatctgctgggtgtgctggtactttgcccagcggtcctcctgcacaaggccgtattccctgccgatgggggtcaggcgctggtcggcgttgtcctgccgcagggtcagccggtactcgctgcggctggtcatcatgcggtaggggtccatgacgcccttggtcacaaggtcatctaccagcgtgcccagatagctggtgtgccggggcagcaccagctgctccttgcccagcgcgttgcgggcggcgttcagccccgccagcagaccctgcgcggcggcttcctcgtagccggaggtgccgttgaactgccctgccccgtacagaccccgcaccaccttgctttccagcgtggcttccagactggtggggtctacgcagtcgtactcgatggcataggcggggcgcatgatctccagatgctcaaagcctttgatgctgtggtagaaggcgttctgcacgtcctccggcaggctgctggatgcgccctgcagatacatttcctcggtgttctcgccgcagggctctacaaagagcgggtggcggtccttgccggagaagcgcaccaccttatcctcgatggaggggcagtagcgcgggccgacaccctcgatcatgccgccgtacagcggactgcgctggatgttgtccagaatgatcttgtgggtctcggggttcgtgtaggcgatccagcattccaccttattgtgcatgggtgcatcggtcagaaagctgaagggctgcaattcgctgtccgggtcgccgggctggcattccagcttggaaaaatcaatgctgcggcggtgcacccgggcgggcgtgccggtcttgaaccggcgcagcggcagaccggcagctttcaggctgtcggtcagggcgttggcggcgtgcatcccgtccgggccggaagcataccacgcatcgcccacgaatattttgccgccgaggttcgtaccggtggcaagcaccacgcacttggcggtgtactcgccgtgcagctgggtgacaacgcccttcacatgaccgttttccacttccagcgccaccacctcagcctgatggatagccagacccggggtctgttccagcgcgtgcttcatgtattcgttgtagcggcggcggtcggtctgcacccgcagtgcgtgcacggcggggcctttgcccttgttcagcatccggctttgcagataggtggcgtctgccgccagacccatcacgccgcccagtgcgtccacctcccgcaccagcgtgcccttggcggtgccgccgatgctggggttgcagggcatattgccgatggcgtccagactcatggtaaagacagccgtttttgcgcccagcacagcagctgcatgggcggcttcgatgcccgcatggccggcgccgatgacgatgacatcataatctcctaagtggttcatatactttcgggtttcctctaacaaatgatttaaaatgccctccgtttcactctgggcatattcagcggaagaattatttttaatttcgcaaatctggaaaatctgcggattttccagatttgccttttcacgggagggttttggaacgaactccctcagtcaaaacctgacggttttgccagctccctctgggagggagcctttggcatggcggcacagtttccgtctaaagtgcaaagcttgcgggcgtgcctgctccccggggggagctgtcgcgcagcgactgaggggctgcaaatcggcggagccggaaaaaacggttaaaagatcttcacgccgaacaggcgtgaatcttcagttttttccggtgtagccctcctctttggggttaaaaggggcgagcagcccctttttcgtggctccagcgcgtcgaaatcgctggcacttttctggttctcttttggtgtcaaaagagaacatttccgcccttatttccccacacaaaaccgctcgaacacctgttcgatgacggcttccgaggcgttttcgccggtcaggtcgcagagggcgtccagcgcgtcatctacgcagaccgagacggcgtccagcccaaagccgccggcggcggcatccagtgcaccggctacggcgtcccgggcgcggagggcggcagaaagctgccgctgcccggacaggctggcggcatgggggtcgatgctgccggtacccagcagccgcgccaccgcagcggcgatgaccttgcggctcccctcttcccggcagcagaccggcagcaccatggcaaaatagggggcgatgagctccgcatcgaaccgggtaggcttgtcctctttgttcacaagggcgatggcggggcgaccggcgcagcgctgcgccagcgccaagtcctcccggctgggcggctcggagccgtcaaagacggctaagatcagcccggtttcttccagctttttccagctgcggcggataccctcggcctcgatggcgtcctcggtctcccgcagaccggcggtgtcaaagaggttcagccggatatctcccagctgcaccgcctgctccaccacatcgcgggtggtgcccgccaccggggtgacgatggcacggtcgaagcctgccagcaggttcagcaaggtagatttgcccgcgttggggcgtcccacgatggcgcagtccacgccctcgcgcagcaccgcaccggcatcgtaactgcggataagggcgtccagctcctcccgcactgcgcccagcacggtgcgcagatgggcggggtccagctccgggacatcctcctccgggaagtccacccaagcagctagatgcgcctgcagggcggtcagctgggctttctgggcgttgatttttttcgccagcgcaccgcccagcgcggcgtttgccagcgctgccccctgccgcccgtctgccgcaatcaggtccatgaccgcttcggcctgggtcagacccagcttgccgttcaaaaaggcacggcgggtgtactcgccgggggcggcaggctgcgcgcccgctgcaaggcaggcttccaccagccgccgcgccaccgcgctgccgccgtggcaggaaagctccaccacatcctcgccggtatagctgtggggcgcacggaaaaacagagccacgccctcgtcaaaggcttcttccctgtccacgaaatgcccgaacagtgcggtgtagcctttggcctgttccactttttttgcggcgttggccgggcagaacacccgggcagccacggcatagctctctgcgccggacaggcgcaccacggcaatgccgcccgccccggggggcgttgcgatggcagcaatggtcgatccctgcatactgcatcctttccgcgcacgcgtcctgcgggtgcgctgtgctggtgcgcccggtacggcagacctgccgcagcgcacactttctgattttacagtttattttaccacgtttttgcgcaaaaagatacacccgccgcgcggtttttccacatcttccaaaatgtttgtggaaaaaaggattgaaaatggtgggcgatggggagactttctgcttgccagcagcgtgcagagacgctccgctgggccagaggcagggaggggtgttccgactcccccctccctacctctggactccacccaccccgcaacgggccaagggctgctcgcccttgacaaacctaaagaagaagtcgaagcacaaaaaagctagcgctgcgccagtcggcgctatcgctttaacgcttttttcgcttctccatttatagcccctcagtcgctgcgcgacagctccccccgggggagcgagcgcagcagctgccatttcccgttacgacccctcccgtgaaaaggcaattctggaaaatccgcagattttccagaattgcgaaattataaatattctttccgctgaagatgcgcagagcgaagcggagcgcattctaaattgtcccgcctgtgggcaggcaatcaaaaagcgccccgcacttccggtggaaatgcggggcgctgcatagttttattgaaacctgccgatcacagctcgatcttgccgaagctgaaatctgcaaagtcgtccacgcgctcggtgcgcttgggtgctacgggtgctgcactctcggcgtcgcggggggcgtaggtgcgctccggcacgctggacggacgcgggccgcggggtgcaccgctgcggttgccgcggtagccgccgttgcggctgccgttctcactgcggcgctcaccgcgataaccgccgttgcggttgccgccgggacggcggccattccggttgccgccacggccacggcgctcgccgtaggtattctcggtctgagcatccggtgcggtggagtagatgaccacgcggcggtcacggccctcgcccttgctctcgctgcgcacaccctccatcttgctgatggcagagtgaatgatgcggcgctcgtaggggttcatgggctccatggcaaagctgcggccggtcttgcgcaccttggcgccaatgcgctgtgccagtgcggtcaggtcgctctcgcgcttgtcgcggtaaccggcaacgtccagccccagcttgatgtaatcgccctccagacggtttgccacaaggcttgccagataggacaggctctccatggtctcgccacggcggccgatgagggcacccagcttttcaccgtccagacggatgatggtggcttcgcccttctgcacggcgctgaaggtcacattctccacgcccatcagggtgatgacctcccgcagatagtccacagcggccttcaccttggcgttctcctcgatgacgatgggctcttccacctcttctgcctcctcggcagcttcggcgggctgctgggcagcgggggtctgctctgcggcgggagcggcaggctcctccgcaacagcagcaggaacttcctctgccacaggagcagtctcctgcacgggggcggcagtctcaacaggctgctctgccaccggctttgcgggtgcagcggcgggggcatccggcagttccacactcacacgcaccttggcgggggtggtctttaagcccagaaaaccggtcttctggggcatttccagcacttcatagctgacattcagatcgtcggcctgcacgcccagcagggcgcaggctttggcgcgggcttcgtccaccgtcttgccggtggattcctgtgtacggatcataaccgtttacctcccttgttactgtttatcctgcttgtcaagctcgctcagcggcacggtgcgctcatccttgtagcgctcggcgtccagctgacgggcatactccagccggcgcttgttcatctcgctggcggaaaggttcttttccacgctcttgccggtcttggggtcggtcaccgtgatggtggtgttcttcacgccgcgcttttcctgcttgcgctttgcggcgatctccgcttccacttccttgcgcatcttctcggggtcgtagaacttgcgcatgatctgggtctgtgcggtcatgacgatgttggaaatgacgtagtacagagagaatgccagcgggtaggtaaagcagaagaacaggtacatcagcggcatcatatacatggtcagcttcatgctgccctgcatctgctggccggaggccttcatactgatgtgggtggacaggagcatggtgaggaccgacagcagcggcagcacgatgtccagagaaagacccagcttcgggatgcgggtcaggtcgatgccaaagaagttcatgtgctggctgaactcggtgatggtagcgatctgctcggcgctgaagcagcccagcacgccgctgttgccggcaaccacctcggcgatgatgttggtatcgcgggtgatggcggtaaaggagatgccggcggcggtcatagcctcgcctgcgctggcaagtgcagcggcgctgatgtggaaaatgcgctccagcgggttatacaccacgccgataacgccgaacatgaccaaaaagttcagcagcatgggcaggcagccggcggtgggcttgtagccaaagtcctgctgcagcttcatcagctcagcctgctgcttttcgggcttgtccttgtacttggtctggatctccgcgatcatgggctggaaagcagacattttcgccatgctcttctgctggctggtctgcagggggatcttgacgatgttgatgagcagggtgaagaggatgatgtcccagccgtagttcggcagcagcttgtagatccactccatgacatagccgagaggaccgctcaggatgtaaaagaagttcatacctttgtccattctgccccggctgtggcccgggacgcattatttttttatcgtaggacacgccgcccacagtgcagcgcgtcataagaagctttattatctaaaatggccgccgctttgctctggccataaatagcggaaataaaattttaatttcgcaaatcgaaaaaatctgcggattttttcgatttgcattttcaccagagagggtcgtaacgaaaaacggcatttgctgctgtcggctgtggccgtcgcgcagcgacttcaaaccggcggaacacaaaaaatcctctagcgcagcggcttggattttttgtatggagcccaaccgctttggggtcaccaggggcgagcagcccctggttcgtgcctcccgcgcttcgaaagtagcggagaccttgccgcgctaaacacgcggcatttgctttgcaaaccggtctgcggcttaaaagccccactggggctttcatgccctgcgggcaccgccgtcctttctggtactcttttgtgcgcgcaaaagagtacatacccggcggcgatgcactttgcaaaaagcattaaattttaaacacgcgactacgctctacgcagaaaacctctatttttccacctttcgcttgtgccgtgtgcaaaacagctttgcgggctgcaggttgcgggcggggctttgccagcggccgggcggcggcacggggtcgtatccccacctgcccagcggattgcaccgggcaatgcgccatgcgcccagcaaaatgccctttacacagccgtgggtcaggatggcctgcatggtgtagttgctgcagctgggcgaaaaccggcagctgcggccgatccatgggctgagggtgtactggtagatgcggatgggcacgcacaatgccctgcggcagagcatttgcagccggttcacgcgcggggctccggcttttgcttgcgggcagggggcacggtggcgggcggctttgcgtccgggcgcttggccttatccggcagaccggcctgggcaaacagctttgccacaacgctgctcagctgccagcttttcagcttgggggtcatgccccgggccacgaagatcagatcgtagccgccgatattgtaatccagatgctcgtcgatggcggctttcatcacgcggcgggcgcggttgcgctgcacggcgtggcctattttcttagttgcggtcaggcccacccgggtgttgcggccgcgggtcttgagcacatacagtaccagtgccgggttcacataggacttgccgcgggcgtacacacgaccaaactcgctgttgcggcggatcggacgataacgcataacgtcggcacctcctttcgtccgggtgcacatgggtgcactctttagccagtatatcaaaaatttttgcagtttaaaagcccatccgggcatttttacgaaaaaacttttgacgggtaaaaaaataagaccgccaatgggatatcagcggtcttttgtgcgcatattcatttctgcgccggatctcacctgcaaggtttaagatcagacagtcaggctcttgcggccctttgcacggcgagcattgatgaccttacggccgttcttggtgctcatgcgggtcagaaagccatgaacttccttgcgctgacgcttcttgggctgaaaagttctcttcatggttgtatcctccgtaaaaacttatccccggtatggggtcttgatcggtcccagattggggacaggcttgcaattcaacagtatatcgcatagtatgacgttctgtcaagcattttttgcagttttctgcaaacttttttctgatttttctgttaaaagcttttcaactttttcaccattttgctgtggaaaacttttttctaccagatattgtggtctttttggcgtgtttccacaaggctgctgtaccatcttatcttatgtattataaattacattatagtaatatagacgcagggagatttttgtggtatactaacgtggtatcagcagcattgttgaaaacttcgaccgattcaatggagtggatgttttatggattctttcaaggacgttttagaagcggcccagatgtactgcaaggcgcagatggccgagccaacgtacaatctctatatcgacgggttggagcccatcagctttgaggactccagccatatcaccctgtcggtgcgcaacgattttatctgcaagatcgtcaccgaccggtaccttggcctgctcaaggaggccttcaagtccgtgctgggctttgatgtggacatcacccttgtggtgcccagcaccccgccccacgaagtagtgctggcccagcagtacgaggcaaaccccgcctccccgcagggcaactacgaattcacctttgaaaacttcatcaaggggccgtccaaccagtttgcgtttgctgctgcgcaggctgtggcggcaaacccctccggggcctataaccccctgttcatctacggcggctccggccttggcaagacccatctgctgaccgccattcagaccgagatcaagcgcacccaccccgatttcgtcatcatgtatgtcacctgtgagcagttcaccaacgagctgatcgccgccatccgcgccggcagcaccgaggacttccgcatgaagtaccgcgtggcagacctgctgctggtggacgatatccagttcatcgcgggcaaggagtccacgcaggaagagttcttccacaccttcaactccctgcatgacgcccacaagcagatcgtcatcgcttccgatcgccccgccaaggagatcaagagcctggaagagcgtctgcgcacccgctttgagtggggtctgaccgccgatgtgcagccgccggattttgagacccgcgttgccatcgtgaagcgcaaggcagagctgctgcatctggacctgcccgaggacgtggcagagttcattgccaaccacctgaaaaacaacatccgccagctggagggcgcagtgaaaaagctgaacgcctattatatgctggagggcatccagccggtgatcagcgtggcgcagaacgccatcaaggatatcctcaacgagacccagccggtgccggtgaccatcgaaaagatcatcggcgaggtttcccgcaccttcaacgtgtcccctgccgacatccggggcaccaagcgcaacgccaatgtggcttctgcccggcgcgttgccatctatattctgcgggaagtcaccggcatgagcatggaggagatcgggcgggaattctccggccgcgaccactccaccatcgtctactccctcaagaccatggagcgggacatgaagaacgaccagcacctgcgggagaccgtgagcgatatcatcaagaacgtgaaagcttaaaccggggaaaactgagcaaaagtcatactcattttagggtgtgaccccaaaatatagggagaaaccggaacaaaaaggggaaaatacgcctatatcttgtggcaaaaaggcgaagctttccacactttccacctagttttcaacatttaacatcagttcttcacatcggctgtggaaagaatcaccgttccccacctttcaacatttccttcacgagccttccacaacccggtggaaagccaaagccccgcttcccggcaagacatttccgggttttcaacatcttccccaccccctactacggttactacaacaagttcaatatattactgccttccggcagcagcccaaaggacagatattccgccggaagtgtgaaaaaaggagagatactgttttgaacatcgtctgcgataaaacactgctcagtgcagccatcgacggcgtttccaaagctgtcaccatgcgctcgtccatcccggtgctggagggcattctgctgaaggccgagggcttccagctcaccctgaccggctacgatctggaaatgggcatcgtgaccaccatcgaagccaacatcaaagagcccggcgagatcgtactgaatgcaaagctgctcagcagcatgatcagccggatgccggcaggtcagatcagcatcgtggctgccgataacggcaagaccaccatccagagcggcgtggcacagttcgagatccagtccatgccggccaccgatttcccggatctgcccaacaccggcgcagagcagaccctgaccatcaagaccggcgtgctgcgggacatgatcgaccgcaccctgtacgccgtcagtcaggacgagaaaaaacccgcccacaccggcgagctgttcgagatcgagctggacaagttgaccatagtggcgctggacggctaccgccttgccatcgtggagcgccccatcaccgccgtgaaggatatccgcatcatcgtgcccagcaagaccatgaccgaggtgtcccacctgctggccaacgatgacgaggaggacgtgcacatcagtgccaaccgccgctatgtggtgttcaccaccgccggttacaccatcatgagccgcctgatcgagggcgaatttttgaattaccgcaacgtcatccccgccggaagccgcacccgggtgaccatcgacaccaaggactttatctccaccatcgagcgcgcttccctgattattacagagcgtttaaaaaatcccctccgcatctcctttacagagggtaaagtcgtggtgcgctgccagacgaaccttggccgcgtggtggacgagttcagcgccgcctgcgagggcgacgaggtggagatcggcttcaataaccgctatctgctggatgcgctgcgcaatgcccgcaccgagcaggtgcgcatggagatcagcggccccttgagcccggtgaaggtgctgccggtagagggcaacgatttcctgtatctggtactgccggtacggtttaaaaatgactaaggagcgcgttttatgcagaagattctcattcataccgagtttatcaagctggatgccctgctcaaatttgccggcctgtgcgagaccggcggcgaagccaaggagctggtgcagggcggtgctgtgaaggtgaacggcgaggtgtgcaccatgcggggcaaaaagtgccgcgccggggacgtcatcgagctggacgggcagagcgtagagatcgggcagggtcagtaaatgcgtctgctttcgctggaagtacagaactatcgcaatatccgcgccgcgcggctggaacccgggcgggagcttaccgtcatctgcggcaacaacgggcagggcaagacgaaccttctggaagcgatctggctgctgaccggcggcaaaagcttccggggcggcaaggatgccgagcttgtgcgccggggagaagcattcgcggtgctggaagccgacacccagcgggaccggccggaaggctgtgagcccgccgagcctgcccatatccgcatgaccgtgggcaccccggaagccgcaaagcccggccgctatgcggcggtaaacggcgcagcgcccaagcgggcggcggcgctggcgggcagctttccggcggtggtgtttgaccccggtcacctgagccttgtcaagggggctccggaagggcggcgcaaatttctggacgctgcgctgtgccagctgtaccccgggtatctggccagttaccgccgctatgtgcgggttttgcaacaaaaaaatgcgctgctgcgccactctgcaaccgggcaggaacgcccctacgcggaaaagcgcaccctgctggaggtgctcaacaccgagcttgccgcgcagggcgaagccctgcagcagcggcggcgggagtatctgaaactgctggctccctgcgcctgtgccaactacgcggagctttcccatggggcggagcggatgagcatccgctatgccgcccagtttgcgccgggcgggcttgccgcactgctgcgccagcggcaggaggaagaactgcgcgccgggcagagcctgtgcggcatccaccgcgaggacctggagcttttactggacgaccagcctgcccgggtgtatgccagtcagggacagcagcgcagcgtggtgctgagcctgaaaatggcggaagccgcagcggcggcgcagatcaccggggagcacccggtactgctgctggatgatgtgctgagcgagctggacgaggggcgcaagcagtatctgctcacctgcatgaaggaaaagcagacctttgtgaccagctgcgatgacacggactttttaaagaccgacggcgaggtataccgcatggacggcggggtgctgaaccgggtgtgacggcatagaggaatgttgcggaaagcattgcataaaagctgaattttcgtggactttatgcaaacaaaagacacgggagaaaatacagtatgtatattcatctggggcgggactatgttctgaacgaccgtgacatcattggcatctttgatctggagaccaccaccacctccccccgggggcgggagtttttgaactacgcccagaagaacggggcggtggtcagcctttcggacgagctgccccagtgctatgtgctggcagacggagggctggtggatgcggtgtatctttcggagctgtccagcgccgccatgcgccgcagagcgcaaaagatggtggagtgaaatttgcggaaaacgggcggaagatccacagaaaaaagagggatgggaaagccccggaactgcccggaaagccgcaccgtgccagccggaacgccctctgcgggcagcgggtgaaaacacaacaaaacggcgagaaaaaagtacactatggtgtaccggttcccgctttgctataatttgaaaaaacaaacgcaaaaatgaacaaaagggagaaaggatatggcagaagaaatcattaccagtacaaatgccgataccgcgaccgaccacgagtataacgccagtgagatccaggtgctgaagggtctggaagcggtgcgcaagcgcccgggtatgtatatcggctccaccggtgagcgcggtctgcatcatctggtgtacgagatcgtggacaacgccattgacgaggcgctggccggttactgcgaccacatcgaggtcaagatcctgaaggacaatatcattcaggtcaccgataacggccgcggcatccccgtggacattcaggccgataccggtctgcccgccgtcaccgtggtgtacaccatcctgcacgccggcggcaaattcggcggcgagaactccggctacaaggtggccggcggtctgcacggcgtgggcgcttcggtggtcaacgcctgctccgagtggctcaccgtcaatgtgcgccgcgacggcaaggagtacgagcagaccttccggcgcggcgacccggacggcgcactgaagtgcatcggcacggtagccgagggcgtcaccggcacccgggtcaccttcaaacccgacccggagatgttcaaggacaccaccgtctacgacttcgacacgctggaaaagcgcctgcgggaggaaagcttcctgaacgccggtgtcaagatcaccctgaccgatgagcgccagctgtacacccccgtgctggaggatggtcaggagggcgacccctgctaccgctccgaggtgatgtgctacgagggcggcatcaagagctttgtcacctatctgggcgaaaagcgcaagctggaagtgctgcaccccaacgtcatctacctcaaggggcagaccgaccgcggcgtggcagagatcgccttgcagtacaattccagctacaacgagctgcttttgagctttgccaacaacgtcaacaccccggacggcggtacccacgaagagggcttcaaagccagcctgacccgcgtgttcaacgattacggccgcagccacggcctgctgaaggacaaggacgagaacctgtccggcgcagacgtgcgcgagggtctgatctgcgtcatctcggtcaagctgcaggaagccgaatttgaaggccagaccaaggcaaagctgggcaataccgagatccgcaccctcgtttccaacatggtctactccaagctgatggagttcttcgaggagaaccccggcgtggcaaaggccatttttgaaaaggccacgcaggccgcccgcgcccgcgccgccgccaaaaaagcgcgtgagctggtgcgccgcaagagcgcgctggagaccagccggatgcccggcaagctggcagactgccgcgaaaaagaccccagccgcactgaaatcttcatcgtcgagggcgactctgcaggcggctctgccaagatgggacgcgactctgccattcaggccattctgccgctgtggggcaagatgctgaacgtggaaaaggcccgcgccgataaaatttacggcaacgacaagctgatgccggtggtgctggcactgggctgcggcatcggtgacgagttcgatatctccaagctgcggtacgacaaggtgttcatcatggccgatgcggacgtggacggctcccacatctgcaccctgatgctgaccttcttcttccgctatatgcgccccctcatcgagcagggtcatgtgtatgtggcacagccgcccctgttcaaggtgcagaagggcaacaccatcaagtacgcctacaacgacgcggaaatggccatcctctcgcaggagatgcccggcgcaaaggtgaaccgctataagggccttggtgagatgaaccccgagcagctgtgggagaccaccatgaacccggacaaccgggtcatcgtgcagatcaccatcgaggatgccgaaaaggccgatgaagcctttaccatcctgatgggcgatcaggtggagccccgccgccgctttatcgagaccaacgcccagtacgcaaagctggacgtgtaagcgtgctcgccctctccgtcagttcgcttcgctcactgccacctctcccaaagggagaggccttggcaaaaagataaactttgcgtggactgccaagggctcccactttgaggaaagacttcccccgcgccgggggaagatgtcgcgcagcgacaaaagggggaatctggcgcgtaagcgcctgagagggcgaggctgttttccgagaaaaaaatccctttcctgtacaaaagagagggtcaaaccctacggaggaacaaatggaagaagattatgtgatgataccgggcagcggaaccaaaaagatcatccgcgatgtcaaaaaggagatcgagacggccttcctggattattccatgtcggtcatcgtgtcccgcgccctgcccgatgtgcgggacggcttgaaacccgtccaccgccgcattctgtacaccatgcatgagcgcggtaacgaccccagccatgcataccgcaaatccgccgataccgttggtgcggtgctgggctcttaccacccccacggcgacgcatcggtttacgacgccatggtacgtctggcacaggacttctcgctgcgctatccgctggtggatggtcagggtaactttggttctgtggacggcgaccccccggctgcttaccgttacaccgaggcccgcatgagccgcatggcggtggagatgctgaccgatatcgagaaggacaccatcgactgggaccccaactttgacgagaccaaaaaggagcccagcgtgctgccctgccgattcccgaatctgctggtcaacggcagtcagggcatcgcagttggtatggccaccaacatcccgccccacaacctgagcgaggtcattgacggctgcatcgcctatatcgacgacccggacatcgacctgcccggcctgatggagcacatcaagggcccggacttccccaccgccggcatcatcatgggacgcagcggcatccgcgccgcctacgccaccggacgcggcaagatcaccctgcgcggacgcgccacaattgaggagaccaagaacggccgcacccagatcgtgatcaccgagatcccctatatggtcaacaaggcgcgtctcatcgagcacatggcagaccttgtcaaggaaaagcgcatcgagggcatcaccggcctgaacgatgagactaaccgcaagggtatgcgcatcgtggtggatatccgcaaggacgccaatgcacaggtcatcctgaaccagctgtaccagtacactcagctgcaggataccgtgggcgtcattatgctggccatcgaccataaggtgcccaaggtgctcaccctgaagcagatgctgcagaagtatgtggagtttcaggacgaggtggtgcgccgccgcacccagtacgacctgaaaaaggccaaggagcgcgcccacattctggaaggtctgaagaaggccaccgacatcgtggacgagctgatcgccaccatccgcgcctgcaagggcggcatggcagaagctaaagctgccatcatggagcagttcggctttgacgacccgcaggcagacgccatcgtcaagctgcagctgggccgtctggctggtctggagatcttgaagatcgaggaagagctggcaagcctgcaggccaagatcgaggactgggaagccattctggcggatgacgcccgggtgcttgccatcgtcaaggacgagctgctggaaatgaagaagcgcttcggtgacgagcgccgcaccgagatccagtccgtgaccggtgaggtggatatcgaggatctgatcgccgaggaacagtgcgtctacaccctgaccgaagccggttatatcaagcgccagctcaaggccacctatcaggcacagcggcgcggcggacgcggcatctccggcatgacccgcaaggaagaggatatcgtgcaggagatgttcgtaggctccacccacgactatgtgctctttgtcaccgaccggggccgcctgttccgcatcaagggctacaccatcgccgagggcagccgcaccagcaagggcatgaacatcgtcaacctgctgcagctggcggagggcgaaaaggtcaccaacatgatctgccagagcaaggacgccgagcagtcgggcggctatgtgaccatggtcaccaagcagggtctgatcaagcgcaccccgctggaacagtacgccaacatccgcaagagcggcctgatcggcattgccctgaacgagggcgatgccttggcatggacccgcctgacctccggccacgatatgctcatcgttgccacccgcaacggtcaggccatccgcttcaacgaggaaaacgcccgcccgatgggtcgtaacggccacggcgtgcgcgccatccgtctggcagagggcgatgaggtcgtgggcgtgtgcatctgccgcgagggcggcacggtgctgaccgtgaccgagaacggcaagggacgccgctcggatatcgacacctaccgcatcaccgcccgcggcggcaagggcatccgcaactacgatgtcagccgcgacaaggttgccgctgtgaagatcgtggacgatgtggatgatgtgctgctgagcagtcaggagggcatcatcatccgcctgcacgccaacgagatcccgctgcagagccgctacggctccggcgtgcgggtgatgcgtctgggcgaaaacgacaaggtgatggtgctggcacgcaccgaccacgacgacgaagcacagaccgagaagatcgatgcttccgaagccgatgctgagcccaccgccgagcagcttgccgagatggaagccgccgatgctgccgccgccaccgaagccccggaggcagaccccgaggagaaggaatgattgagctgagggcaggccgaaactccctcagtcaaaacctgacggttttgccagctccctctgggagggagcctctggcgaaaccacgcactttacgttttaaacggaaactgtatcgctatgccaaaggccccatcttagagggggctgtcgccgcaggcgactgggggagtttactttgccgcaaactgttgtttctcccgcagcgccgcgctttcgtagaaagcggcgctgcaactgccgttttcctctacgacctctcctgtgaaaatgggtttcaggaaagtccgcagactttcctgaaactcgaaattataaataattcttccgctattgatgtgcagagcgcagcggagcacattaaaaatcgtttcaccgtcaggtttgtctggacttccccttgaaactgtgctaaaatgaacaaaatcacaatacccgtgggggagtagcaggcgctttgcagagcgcagcaagtcaacataatgactgtttcagtctggcttgctttcatttgcgagactcatgtgttttggtgcgtgtttgctgcgcctgtgcacatggagtggatcttaaaaaatcacccggtcccggacgtacaatgcgcccggggccgggttttgttttggtttggaatacggtcaacaaacaggaggcagacagaatggaatggagttttgtgttttttctcaacagcgttttgctgggcgtggggcttgcgatggatgcgttttcggtgtccatggcaaacggcctgcacgaccctaaaatgaacaagggcgcgatgtgcaaaatcgcgggcacttttggcatttttcaggccgcaatgccgatgatcggctgggtgtgcgtgcataccatcgtggagctgttttcgtcctttgagaccctgatcccgtggatcgcgctggcgctgctgagctacatcggcggcaagatgctgatggacggtatccacggcgaggaagccgaagaagcggcagagctcagcgccggggcgctgttcatgcagggtgtcgccaccagcatcgatgctctctcggtgggctttaccatctcggaatacggctggctgatggcgctcaccgctgccatcatcattgcggtggtcaccttcatcctctgcatggcgggtctgcgcatcggcaaaaagttcggtacacagctttccggcaaggccaatattctgggcggtgtcatccttatcggcatcggactggaaattttcatcaccggggtgttctgaatataaaaagcccggagcgtctgcggatgctccgggctttttgctttaactccctcagtcacggcatacgccgcgacagctccctcgaggagggagcctctggcggaaccggaaacttcacggtttgaccggaaagtttatcgccatgccaaaggccccatcccagaggacgacttcccccgctccgggggaagatgtcaccgcaggtgacgaaagggggagtctggcatcgcgtagcgatgactgggggagtttttcgtctttgttccccgtggaacaatttggcattatttcacggtctccggctcaaaaaagtcggcgtattccttggtcagcttgctgccaaggcggcggataccgccgtataggtgccgctccaccagcggctcaaaggcggcaaggtcgcatcgctcgatggcgttcagcaggttgcggtgatcggcaatcacctcgtccaacccgccggtggtcatggtgtccagcatacggaaacggctgtaatcggcgtgggcgttctgtaaggtgctccacaggtacatcttgtccatggcagaaaaccacatctcgtgcaggcggcagtcggcttcgtacagcttgttgaagtccgggctctcgacatgggcaagggcttcgtaggcgtccacccgcgcacggatctgcgcccgctgcgccggggtggcgatgggggcaaaatcgcgcaggatgcgcccctccacagcggtgcgctcgtagatcagctcgtccacgatgcgccggttcagccgggtgacggtggtgcccttgtagggcacgatgcgcaccagcccgttttcctgtaatttttgcagcaccacccggatcagggagcgcggcgcaccgaaccgggtgcacagcggattctcactcagcgcagagccgggacggatggtcagatcgatgatctcccgctccagcacggcgtaaatttcggcatcagtcttgtattgctgttccatatcactcacctaattccaaaaactccttccacggtgcggcggcgggcaggggcagagaaaaggccatgggcttgccggtgtccgggtgcacaaagcgcaggccgcagctttgcagggcgatgctgcccttctggcggctgccatatttgccatcgccgtacagcgggtgcctgcggctggcaaactgtacccggatctgatgggtgcgcccggtgtgcagggtgatctcggcaaggctgttctcccctgccgtggcaaggatgcggtattccagcaccgcttcccgcacccccttgcggggacggctgaccgggaacaccctgcccttgcggctgtccttgaacaggtagtcccgcagcacccctgcggcgggcagctgcgcgtccggcgcaccggcaatgaccgcacggtactgcttgacgaactgcggcgcggcggctttaccctcgacgcggccatcctgcacggcgtaggcgtcctgactttgggtgacctgacggctcagggcggcggcagctgccggggtgcgggcatagaccatcaacccggacacaccggtgtccaaccggtgcaccacccccacaaaggcatcgggcgcgttccagtgtgcccgcagcgcggcgggcacgccctcctcgctggaaagcccggcaggcttgtccagcaccacaagggcggcgtcctcgtataagatcacagcttgccctcggccagcagagccttcagcttcagaatgcccgcaatggtcttgccgtccttgatctcgccgctcatgaccatctgatacgccttttccagcggcacacggtcgggggtcaggaactcgtccgcatcaaggtgcatcttcgtttcgtgcagaccggtggctacccatgtgtagatgacctcggtatcgtagcccacggtggggtagaactcgcccagcgagatgtagttgtcggcggtcagaccgcactcctcttccagctcccgtttggcagctgcaaaggggtcctcgcccttttccagcttaccggcgggcagctcccacagctgctgctgcatggcatagcggaactgccgcaccatgcagatggtgccgtctgcaaaataaggcaggatgcaggcgccgccgtggtgatgcaccacctcgcgggtggcggtcttgccgttttccagcagcgcggtgtccttggtcagggtgatgacccgcccctcgaacagggtctcgctggagagagttttttcaaagtgtacggtatcgttcatttgttttacgccccttttccggcgcagcgccggttttatgctctcagtttacggcaaagtgcggtttgttgtcaataaagatatgataaatacaagagggcgggacgatttgaaatgcgctccgcgttgctctgcgcatcttcagcggaaagaatatttataatttcgcgtttgtcgcgctctgcggagcgctccaaacgctattttcacgggaggggtcgtaacggcaaacggcagatgcagcgccgctttctgcgaaagcacggcgctgcggacgtgcccgctcccccgagagggccgacttcccccggccgggggaagatgtcaccgcaggtgacaaaaaggggaatctgtcgcgcagcgactgaggggttatagatggagaagcgaaaaaagcgttaaagcgatagcgccgactggcgcagcgctagcttttttgtgcttcgacttcttctttaggattgtcaagggcgtgtagcccttggcccgttgcggggtgggtggagtccagaggtagggaggggggagtcggaacacccctccctgcctctggcccagcggagcgtccttgcacgctgacggcaggcaaaaactttccatccaaaccgcaaaccttccggttacgccagaggctccctccccgagggagctggcaaaaccgtcaggttttgactgagggagtttcctttcgcgaaaaaaatcacaatttctggaagcgacggtgggcaaaaaccgaaaatcagcatcactgcttgctttagcgcactaaagaaagtacaaaaccgctaaaaaatttcttaatttttggtgcgtttgtcgggcggtttgcgtttactttattgccggaatctgctattatagtatacaagcaatagtgccttttatggggttctccggtcccagcgggcatattgccccgcgcaaaaggtaccaaattctgaataatggaggaagaaaaatgcctagagcaaagcaaactatggatggcaataccgctgccgcccatgtagcgtatgcctacacggacgtggctgccatctaccccattaccccgtcttctccgatggctgactctgtggaccagtggtccgcagccggccagaagaacatcttcggcaaccaggtcaaggtcgttgagatggagtccgaggccggcgccgctggtgctgtccacggctctctgggtgcaggtgctgttaccaccaccttcaccgcttctcagggcctgctgctgatgatccccaatatgtacaagatcgctgctgagcagctgccctgcgtgttcgatgtttctgcacgtaccgttgctacccagtccctgaacatctttggtgatcacagcgacgttatggcttgccgccagaccggctttgcaatgctggtcgagagcagcgtgcaggaagttatggatctgtcccctgtcgcacatctgtgcgccatcgagggcaaggttcccttcctgaacttcttcgatggcttccgtacctctcacgagtaccagaagatcgagaagtgggactacgctgatctgaaggaaatgtgcaacatggaggctgttgaggagttccgcaagaaggctctgaaccccgaaagccccaagatgcgcggttcccacgagaacggcgacgtgttcttccagcaccgcgaggcctgcaacagcgtttacaacgctctgccggctgttgttgagaagtacatggccaagatcaacgcaaagctgggcaccaactacgatctgttcaactactacggcgcagccgatgctgaccgcgtgatcgttgctatgggctccatctgcgacgttgctgacgaggtcatcgactacctgaacgccaagggcgagaaggtcggtatcatcaaggtccgcctgtaccgtccctgggtgtcctccgctctgctgaaggtcctgcccaagaccgccaagaaggtggctgtgctggaccgcaccaaggagcccggctctctgggcgagcccctgtatctggatgttgccgctaccctgcgtgaggctggcctgaacgatgtcgttctgaccggcggccgctacggtctgggcagcaaggacactcccccgtcctccatcttcgctctgttcaaggagctggagaaggatcagccgaaggagcgtttcactctgggtatcaccgatgacgtcaccttcctgtccctgcccgaggtcaagcccgctcccattaccgcagctgctggcaccaaggagtgcaagttctggggtctgggcggcgacggcaccgtcggcgcaaacaagaactccgtcaagatcattggcgaccataccgacaagtatgttcaggcatacttccagtatgactccaagaagaccggcggcgtgaccatcagccacctgcgtttcggcgacaagcccatccgcagcccctactacatcaaccaggctgacttcgtggcctgccacaaccccgcttacatccacatgggcatgaagatggttcaggatgtcaagcccggcggcgtgttcatgatcaactgccagtggtccgatgaggagctgggccagcacctgaacgccgaggcaaagaagtatatcgctgacaacaacatccagctgtataccatcaatgctatcgataaggctatcgagatcggcatgggcaagcgcaccaacaccatcctgcagtctgcattcttcaagctggctgacgtcatgcctatcgatgacgccatcaacttcatgaagcaggccgctcagaagagctacggcaagaagggccaggacgtcgttgagatgaactggaaggccattgacgcaggcgttgacgctatccacaaggtagacgtgcccgcatcctggtccaaccccgaggctgatcccgcacccaaggctctggctggccgtccggaactggtcaagcagatccgcgacgtcatggagcccattgcccgtatggacggcgacagcctgcctgtctcctccttcgtggcaaatgcaaacggcgagtgggagcagggcgcttctgcatacgagaagcgcggcaccgctgtcaacgtccccgagtgggatgctgcaaagtgcgttggctgcaaccagtgtgcattcgtgtgctctcatgcaaccatccgtcccttcctgctgaccgctgacgagctggcagctgctcctgcccagaccaagagccgcgataacaagctgacccccgagtacaagtttgttatggctgtttctccgctggactgcatgggctgcggcgagtgcgtcaccgtctgccccaccaaggctatcaccatggttcctcaggacagccaggccgatcagcaggcagtctttgactactgcgtggccaacatctccaagaaggctaccaagatggccgacgacaccgtcatgggctctcagttcaaccagcccctgctggagttctctggctcctgcgcaggctgtgccgagacctcttacgctcgcctgatcactcagctgttcggcgagaagatgtacatctccaacgctaccggctgctcctctatctggggcggcaccgcttccatctctccgtacaccgtcaacaaggacagcggccatggtcctgcatggtgcaactccctgttcgaggataacgcagagcatggtctgggcctgtacatcggccagaagaccgtccgcgagaacctgatcaaggagatcgcagaggttgctggttccgacaaggcttctgctgagctgaaggctgcttacgagcagttcatcgcaaccaagaacaacaccaaggccaacgacgagcccgcaaaggccctgatcgctgagctggagaaggctgctgctgccggctgcgagaagtctgcagagatcctgaagagcaagcagtacatcgccaagaagtccgtctggatcttcggcggcgacggctgggcatacgacatcggcttcggcggtctggatcacgttctggcttccggcgaggatgtcaacgtgatggtcttcgatactgagatgtactccaacaccggtggacaggcttccaaggcctccaacatcggcgaggtctgccagttcgctgctgcaggtaaggagatcagcaagaagagcctgtccgagatcgcaatgacctacggttacatctatgttgctcagatcgctctgggtgctaacatgaaccaggctgtcaaggctattgccgaggctgaggcttaccccggcccctctctgatcatcggctacgctccctgcgagctgcacggtgtcaagggcggcatgaccaactgccagaacgagatgaagaaggcagtcgaggctggctactggaacctgttcaccttcaaccccgccaacaaggcacagggcaagaaccccttcaccctgacctccaaggctgtggacaacgagaagtatcaggctctgctggcaaacgagacccgttacagccgtctgacccgcgccttccccgagcgtgctaaggagctgttcgctcgcaaccaggaggttgcaaacgaccgctacgagcacctgacccgtctggtcgagctgtacaagtaagctgtttttaagcagcggcagagacaccaaatgaaccagcggctcctgctctttcccgtgtgaagagcggcagccccgcatcggcggttactgcgcaatgcagcggtgcggaactgtggaatttgcctttgccgtgcacagaacaggctgaacgttttgccctgtacctgacagaacggtcgaaaaacctgatttcattccccgccttttgcgcaggggcttgagataccaaagcgcccgcgagggcccttgagagcacaccccgcgtgtgtcaggagcataaggtctgcgtgcagataccttgctccgcctgcggcataagacctgccttgcagggatcttgcctcagtgaaaaaactgcatcagtttttagcgccccgctcaccctccggtgaccggggcgtatttttgtgtgcgtcaaccaaaaagcctatcacaaaatcttccagaattttccgcttcctttttacagtttcttcatagcttcttaacgaaatgaatggtgaaagctgttatacttttgccatgggaagcggggccgcaaccacttcccaagtaacatgattcctcctcacaccaaggcaatatccaagcaaaacacccttctctgtgtgccgcaacacggagaagggtgttttgtttctgtaagacgccgtattgcaattcaactttttaatgcagcggcaacaacgttgaattgcatatcgcaaatatgctgtttgaatgttgcactgatttcttgccttgcgataaaaatctttgcaaaacctcgctttagggttgaccccctttttttgcggcgctataataaaaaaggatatagccaacgcagcgcccggcgcgggtgctgcggctgcggaatttacgaaaactgggaggtgaacgcaggacaatggaccctgatcatagtcgaagtagctccaccgatgcggtagatcggacaacaaaaagtactgcgttcgcctttttgcccccggcggcttattaaaaagcccccggcataggaaaggcgcggctttgcgtgcgcggaaacggctgcttttgcggcattccggcaccgggcggcgcgttttttgtttcccgacctgctgcatcctccggcgcggagaaagcgctccgtgccgtatagtgcccagaggaggtagcccatggaaatggaagaaaagaagctggaaaccaacacggaacagaacctgccggtgcaggagctgcccgccgatatccccgccgaggtgcgtcagaagctggcggaggatctgaacgaggaagccaccgaggatctgaagcaggatatgcgggaggcagagcgagaggaagccaatgacgaagaggtcaaggcaaaccccgagatgctgaccaagagccgtctgctgaagctgctgatcaaaaagcagtacgtcaagctgcgcgaggtgaccgaggaagagcagcccgccgaccttgccgagctgctggaggaactggacgagaacaaccgtctggtggtgttccgtctgctgaaaaaggaagttgccaccgaagcctttgcctatatgtccgacgaagcccgggacgatctggtaaacgctttctcggacgtggagctggtgagcgccatcgaggagatgagcctggacgatgccgccgacctgctggaagatatgcccgcaggcgtggtcaagcgggtgctggaaaaatcctcccgggagacccgcgagagcctgaataagctattgaactacccggaaagctctgccggcagcctgatgacgccggaatacgtgcgtctgcgcatggatatgacggtggaacaggcctttgctgccatccgcaagcagggcgagaacgccgagaccgtctacacctgctatgtggtggagagcaaccggctgcagggcgttgtctcggcccgcaatctgctgctggcagaccccaagacccccatcacggagatcatggaggacaatctggtcaccgtgaaggtcaccgacgatcaggagtttgtggcccgtgagatgcagcgctacgactttaccgccatgcccgttctggacaacgaggggatgttcgtgggtatcatcaccatcgacgatgctattgacgttctgaccgacgagagcaccgaggatatgcagaagatggctgctattctcccggatgacgacgccaccacctactttggcaccagcgtgtggacccacgccaagcaacgcatcccgtggctgctgattttgatgctgtccgctacctttaccggcatggtcaccacccactacgaggaagcctttgtcagcctgccgctgctggtctccttcatgcccatgctgatggataccgccggtaactgcggcaaccagatcagcaccctgatggtgcgcggtctggcactgggcgaggtagagcctgccgactttgtgcgggtgctgggcaaggagctgcgggtgtctgccatcgtgggcgcggtgctgggcgttgtgaacggcctgcgcatctacctgatgtacaccttcctcttccccggtcagtacgccaacgtgatgggctacgccatcgtggtcagcgtgtcgctgttcttcagcgtcattctggcaaagctggtgggcggtatgctgccgcttgccgccaaaaagctgggtgccgaccccgctattatggctacccccttcatcaccaccatcgtggacgcctgcagcctgatcctctatttccagatcgcacagctggtgttccgcaatatgatgtaagctgtcagctactgcaccccggacaagcaaactcgcttgtccggggtgcttttttagcatcctcgccctctccgtctgctcactgcgttcgcatccacctctcccaaagggagaggccttggcaaagagatgaagtttgcgtggactgccaaaggctctccctttgggagagctggcaccgaaggtgactgagagggcgaggatgctacccttgtgcagcagctttttccagtgtggaaaaccgctgtttgtgtccgttttccacaccgggtttttctccccggcggtttgtggaaaactgcatggggtgagattccagattggagaaaagcaaatccgtaagccggagtaaactgtaaaaacaaaagaaaaaacttcgactttcttttttataaaaggcagaatgcccacattttagcccagaaacttccagaatacggcggcgtccattacggcttgtatagggctttcctccaccggatgtggaaaactatgtggaaaaggtggaaaacatcgttggaaactgcgcttctttttcacaaaaacggtggaaaacccggtggaaaaagtgaaaagttcattccagaacggatagtccatacaatttccggttgtcgttttgggacttaaaacccgcatgaatgctgtgtttttttcgccttttccacaccccggcggcttcggggtgaaaaaactgcgcttgcagcctgtgtgccgggaaagaaagcacagtttcaacgccttccgcgtggattttcttgaatgcgggggcctgtcatggtaaaataggggtaacatgaaactggcggggcatcccgcaacggaggcgaaacacatgaacaactggctgaataagctggagcgcaagtatggccgctatggcatcccgaacctgaccaatattctggtggcggggcagattttggtattggccatcgagctgtttgttgaccgcaccatcccttactggctggggctcagccgcagcctgctgctgcaggggcagatctggcgggtgatcagctttgtattcatccccttttccggcggcagcatcctcagcgtggtgctgggcgtctacttcacatggttcgtcggcacggcgctggaacgggagtggggcgatttccgctacacggtgtatctgctttccggcgtgctgggcacggtgctgggctgcctgctcaccggcgtgaccgcaagcacctactgcctgtccctctcactgctgctggcctttgccatgctgtacccggaggtgcagctgctgctcttctttgtcatccccatccgggtgaagtatttcggcgttttcgcggcagtgctgtgggtgttcagctttctgggcgcatccctgcccggcaagctggactacctgttgtccatgctcaacgtctggctcttctttgcccccatggcctaccactccctccgcgcatgggtgcgccgggagcagtggaagaggaagaacaggagataaaccctcccgtgaaaatggaaactgccgaggggtgttctcttttgacaccaaaagagaaccggaaaagtgcgcgctccgcggggaaagtttctgcctgccagcggcgggcaaggacgctccgctgggccagaggcagggaggggtgttccgactcccccctccctacctctggactccacccaccccgcaatgcaacaactgcgaccgccgccagcggcggaaacagggagcagctgttggggcagcggccagcaagacgcgagtgccgcccaaggcacgaagcggatgctgggtgccgcaacctgtcgccaagggctacacgcccttgacaatcctaaagaagaagtcgaagcacaaaaaagctagcgctgcgccagtcggcgctatcgctttaacgcttttttcgcttctccatttatagcccctcagtcgctgcgcgacagctccccccgggggagcgagcacgcccgcagcgccgcgctttcgtagaaagcggcgctgcatctgccgcttccctctacgccccctcccgtgaaaatagcgtttggagcgctccgcagagcgcgacaaacgcgaaataaaaataatctttccttaaattatgcgcagagcgaagcggagcgcattttaaatcgtcttacgtctcacaaaaggagtacccccatcatgatgctggaccgcatggaaggcaacgcagaactgaaaaccagcgtgcagcagatgctggccacccggcggctgacccatagcgtgctgctggtgggcgaagccggtcttggcaccggctttgccgcccgctgcatcgccgccgactacctctaccccgccggcggtgccgccgccgaagcccttttgcggggcgagtgctgccgcgccgtggcaaaggccggtaagcgcgacagcggcacggtggagaccggcatcgtgcgggaagccatttcggtgtccggcatgggcagcggcgggaagtatctggtgggtcaggtcaccgccatgcgcagcgaaatttttaacaccagcctttccgccgaggggcgcgcggtgcttttgtaccatgtggagcgcatgaacgaggaatccgccaacgccctgctgaaggtcatggaagagccgccggagggggtgctgttcctgctcacggcggattctctggccagcgtgctgcccaccatccgcagccgctgcgtcagctttgcggtggcaccggtgtcccctgccgactgcacccgctactgcgcggcgcagggggtggacaaaaaaacagccgcactgtacagtgagctgttcgatggtcatatcggcacggtgctggcggtcgcccgggacgaagcccgcgccgcacaggtggaaaaggcgctggaacttgcccgcgctgccgccgcccgggacagctacaccgccgccgtgctgcttgccgcttacgaaaaggataaagccgctgcagccgccctgctgaccgattttcgcgccgtggcagcagctggtctgcgcagcagtccccgcgccccggtgcagggcacacaggcgcggcaggcggtgcgtctggcagatgccgccttgcagcggctgggcgcacaggtgaaccccaaagtggtgctgacggtgtttgcggcaaagctgcgtaccctttgaaaaaataacgaaacaacaagaaccccctccggcgcttgcggtacaccggagggggttcttgtttggggtattgctttggtgtgaggaggaatcatgtgcggggaagtggttgcggccccactgtccctgcaagatacagtatacccgattttacgaaaaaagtcattacatttctgtgaaaaatcaaaaaagttcctgaaactttgtaccgcactgcgaaaaaaatacaaaatgaaacgtttaagaagaaaaacttaactccctcagtcaaaacctgacggttttgccagctccctcggggagggagcctctggcgcgcccgcaagctttacgcttgagccgggaactgtacctctatgccaaaggccccatctcagagggggctggcatcgcgcagcgatgactgggggagtttctccctgtgtgcactctcacccgtttttcagctgctccgcgtgcagttttccgtgctccacataatgggcagcgttgtgcaggttggcttccacctgcgccgcgctcacctgcttgatgacccgggcgggcacgcccaccgccaccgagttgtccgggatgaccatgccctccggcacaagcgcccctgccccgatgatgcagtttttgcccaccacgcagtggttcagcaatgtggcgtgcatcccgatcagactgccatcccctacggtgcagccgtgcaccagtgcgcagtgccctaccgtgacgttttcgccaagggtcacgcagccgccgatgtcgcagtgcagcaccgcgttgtcctgcacgttgctgtttttgccgatggtcagcgtgccgtcatcgccgcgcagcaccgcgccgtaccagacggtggagccgggctttaaaaccacatccccctgcacggtggcgctgggagctacaaaagctgcgccttcatcccggggctttttcccacaaaaagataagaacattgttaaaaaccacctttcaccctttttcttttggctggtttatggtattctttataaagacgggtctcgccgtttctattctatcgcaaggcgggaaatgagtgcaagagtaaaatagcatatttgcgatatgcagtttgcggatgttgttcgtgcattgaaaacgcaaactgcgatagcaagctgacgctttatcatcaagggagaagttcatggatcttcaaaaaagctgtcgccggctggcggcatgggtgctcacgctggcactggctgcggcgctggctttgccgggcggggcggtatacgcaatgcccatccagaccgccaatgcacaggaaagtgtttacctgatcaacgccgtcaccggcgaggtgctgctggaccagaactccgggcagcagcgctgcgtggcaagcctgaccaagatgatgaccgccctgctgctgctggaaagcggcaagaaccttgacgagaccatcaccgtgcccgccgacctgacggaggagttccaaaagatccgcagtcagaacggcagcaccattctgctggcggcgggtgaacagctgcgccgcatcgacctgctgtatgcgctgctggtgtgcagcgccaacgatgccgccagcgtcatcgcgtgggacgtggcgggcagcatcccggcctttgtgcagcagatgaacgcccgggcggagcagctgggatgcaccagcacccggttctcctgcccgcacggcttgtacgacgatggaaatgtttccaccgcacaggatatgggaaagatcgcgatagcctgtgcccagtacgagatataccggcagatcgccgataccctgcaatacgagatcccggccaccaacctgcacgcggcgcgcagtatccgctccaccaacaagatgctggacccggaaaacagctgctaccgtgcctacattcacggcatgaaaaccgggtttaccacaaaggcggggcgctgctatgtgaccgccgcccagcagggggataccatttacgggctggtcattctgggctcggaccggaaaaacatctacgccgaagctgcggccattctggactgggcctttgcgggctgtccgcagcagcaggctgctgcctgaaaaaagccggttttcttttaccggcatctgtgatatgctttatcgctgaagaagttgattagggggtacgctcatgcttcataacacgttctgccgccggctggcggcgctggtgctcacattggcagtggctctttcggcagcgctgccggggtttgcggcataccccatgcccgtccagaccgctaccgagaccgagtcggtgtatctgttcaacgcggacaccggcaaaaccatcctgagtcagaacgccgaccagcagaaatatgtggcaagcctgaccaaactgatgaccgccctgctgctggtggaaagcggcaaggacctgaacggtgaagtgaccgtgcccaccgacctgacgcaggagttcaaggatatccagaacgccaacggcaccaccatagggctgcgcatcggcgagaccgtgcgccgcatcgacctgctgaacgccatgctcatcgtcagcgccaacgacgccgccagcgttattgcgtgggacgtgggtggcagcgtggtgggctttgtgcagcagatgaacgccaaggcggcagaactgggctgcaccggcacgaactttacctgtgcccacggcctgtttgactacggcaacgtgtccaccgcacaggatcttgcaaagatcgccgccgcctgcgcggagaaccagacctttgcacaggtggcgggcactgccagctatgtgctgcctgccaccaatctgcgcaaggcggagtatactatcagcagctccaacagcctgatgaacagcgaaagctcaaactaccgggcgtatgtccagtgggtcaagggcggctttaccacgctggcaggccgctgcaccgtggcgtttgcccagcaggacggccacagctacgggctggtgatccttggctgcgacacgctggagcacctgtttaccgagtgtgacgacctgttcgactgggcgtttgccagctttgccgaccgtccgctggtggatacccagaccgtgctgaccaccgtagacctgaacaagtgccgcaccgagccgtctgtggagctgtacgccgccgcgccggtcagcggctacggccacagcgatgataaggtgagctattccttcgacctgcccgagagcgtctccgctaccgtcaaggaaggtcagaagctgggcaccgctaccgtctatctggacggctacgaggtgggacaggtagaccttgtgacccaccgggagtatgtgtcggatttccgcaccgatatcaaagccaccctgctgctgctctgcgccctgattttgatcctgtgcgcactgggctttgccaccctgcgctgcggcggcgggctgacccttaaccagcgccgccgtcagatgaaacggagaagataaaaaataactccctcagtcaaaacctgacggttttgccagctccctcggagagggagcctctggcgcacccgcaaactttgcactttagccggaaactttaccgccatgccaaaggccccatcccagagggggctgtctgcgcagcagactgggggagttcaggcaagaaccccttccgtcatcgcctgcggcgcgcatttcaaatcgtcaaagataaaaggggcagatgcacggttgtgcatctgcccctttttataatttatactgctccataaatgccgtgcaccgacacttccccggtgaaaacgtgctgttccccggcgtcggtgcgcaccactaaacgcccctcggcgtccacgtccacggcttcgcctgcgccctgactgccgtccggcaggtcaaaggtgacccggcggcccagattgatacaggaggctttgtattcctcccggaagggcgcaaagccgtcccgggcaaaggtgtacaggttgcggtcaaagccgaaatctgtcagcccctcggccagccatgcggggtcggtggcaagatccaccgctgcgccctgcagtgccagcgaggtgccgtggggcaggtcggcggcgtcaaaatagctctgcggctgggcaaggttgatgccgatgccgcacaaaatgccgcgcccctgctgctggtagccgtagcttacgctttcgcacaggatgcccacgatcttttttccgttcagcaaaaggtcgttgggccacttgatctggcagtccacgccgtagcgcagctgcagctggcggcgcaccgcaaggcttgccagcagcggcagggtggcgggctgcgccagcggctccttgatggccaccgtgtagtacagcgccttgccctcggcgtttacccagctgcggccaagccgcccgcgcccggcggtctggttttcggtatacaccgccgccaccgggccgaactcctcaaaatgttcctttacataggcgttggtgctgccgcattccggcagatagcgcacctcgttgatgctcattgcttgggtacctctttgtgctcataggcggtcactgcgccgttttccagcgtcagcagaccgtaggtgtccgggccggtgtagcagcgcccgcaggagccggggttgaacaaaaatacattgccccgctgctctgcgtggggaatgtgggagtgaccgaacagcgccacctctgcgccccgggcggcggcagcgtctgccagcgtatccagatcgtattttacaccgtacatatggccatgtgtatagaaaaccaccgtctgatcgaagcccgccaagccgtccagcggctccagtgcaccaaaatcgcagttgccggccacggaatacacccgcagatgggggaaaaaggccagcgcctgttccagatcccgcaggccgtcccccaaaaagatcacagcatccacgttgttctgctctttgttcaaaatgcgcttaatggcgtcacgcgcgccgtggctgtcgctcaggaccagtagttttgtcacggaaagatatcctcctctatactcattcggcagtctgctgcaacagcagcagctgcttgtacacttcactcttggaataggccgtgccctgcgcagcagccttggcggcggcagaagcgctgaagccctcaatggtcagcgcaaaggcgcgctgcgccgcctgctccagggtcagctcctcttcctcggcggcaccggcgggcgcacccgccatcaccagtacatactcgccccggggttcggcggcgcggtagtgctccacggcttcgcccaaggtggttttccagatctcctcgtggagcttggtcagctcccggcacagggtgatgctgcgctctgcgccaaaggcggcggtcagatcgtccagcgtggtgcgcagcttgtggggcgcttcgtaaaagatgaccgtgcgcttttcctgcaaaagctcggccagacgctcctttttctgcttgcggttcaccggcagaaagccctcgaacacccagcgggaggtgtcctgcccggagaccgccagcgcggtaacgcaggcggaagctgccgggatgggcaccaccttgatgccccgcgccagcgcgtcccgcacgatgacctcgcccgggtcagacacgcagggcatcccggcgtcactgcacaaggcgcagctctcccctgcttcgatgcgctgcaaaatggcttcgcccttctgcaaagcgtgctcgtagtagctgaccatgggctttttcagccccagataattcagcagcttcatggtcacacgggtgtcctcggcggcaataaagtcagccgcgccaaaggtggcagccacccggggcggcatatcctccagattgccgatgggcgtcgccacgatgtagagagttcctgccataattacctcctgaatttatcgtccgtacagcgccgccccggcgcggatgagcacgtccggctccacccgcaggccggttttacggttcttctgggcttccacaaggaacagccacggggcattttccggggcgttcttcacaaaggccagccgcttgggttccagccggtgggcgcgcagcacggcaagcacctcggccagccgctcggggcggtggcacagcgccagccgcccgccgtccttcaaaagacggaagccgcaggcacagacatcctctaacgcgcaggtgttttcgtgccgggcaagggcatgggcggcatttttactctgcggcccctcggtaaaataagggggattgcacgcgcacacgtcaaattgcccctcgtcctgccgccatatgcgcaggtcggcacagacgggggtgatgtgggtgagctgctgctcttccaccgctgccgccagcagggcgctgccctcgggctgcaattccagcgcggtgcaggggccgcggtgcccccggtcgtgccattccagcgccacgatgccgcagccggagcacaggtctgcggctttctggctgcgtttcggctcacagaagcgtgccagcagcagcgcatccgagccgaaccggtgctccggggtgcagtagaccatagttctattatacaaaacttccgtagaatgttccatagacagtgtgccgtttcccttccaaaaaatgcagggtattttcctgcggaatttgtgcatgaaacaaaaagcggggcggctgcgcagtgttttgcgcagtgcctcttttgcggtggacgattggaaaatatttttgatttcgcgggaaggagcgattttactttatgataccacaaaaaaggactgctgcacagtgtgcagcagtcctttttgatgcgttttcagcaaaaactactgattattcagcagcgattgcaccagtggggcaagcaccctcgcaagcaccgcaatcgatgcaggaatcagcgttcacaactgcagcgccgttctcgatggtgatagcgccaaccgggcaagcgccctcgcaagcgccgcagccaacacatgcgtcagaaaccttgtgtgccataataaactctccttttttatcccgtgccgatgtaattatgaagaaacgtaccttggcacggccacgcacgccccccggaatttgtatccttgtctgcattctaacaaagcaggccggaaaaggcaagactaaccgtgttgccacacccacaaaataaaatattttgtggggttgcacaaaagcacggcctaacttatagccaaaattgccggagatttttagcgaaaatcacgaatcctagttagttttatgatactaaccgcccggatgttcatcccggagatcaacgcctgcagcttgccccggagcaaaaggcttcccccacccgggggaagtctttagtcggatcattgctctttatggatgcttattccttttcacttgcgcggcggcgggggcaggcggggcgcttttcatcgtcggagcttgccaccaccggggcggggttgcgcacgccggagtaatcatcgtccgggtcgggacggcggggcgggcgcttgccgccgctcacatactcgcacacgcccaccttgtagtaccggggcgcaaggctctcggtgccgcagcgcacccgcaggtagccggacaccgggttcacctccagcacggtgcccagaccgtccggggtgcgcaccgtgctgcccaccatgggcatgatgctgttcaggtactcgtaggcgctctcctcgtaggcaaggcagcacatcagacggccgcaggcaccgctgatcttggtggggttcagcgaaaggccctgctcctttgccatcttgatggaaacaggctggaaatcctttaaaaagcggctgcagcagaaaggctggccgcagatgcccagaccgccgatcatcttgctctcgtcgcgcacgccgatctggcgcagctcgatgcgggtgtggaagatgcctgccagatccttgaccagctcccggaagtccacccgtccgtcggcggtgaagtagaacatgatcttggagcggtccagcgtgtactcggcctccaccagcttcatctccagcccgtggcggacgatgcactcctgacaggtgtggaaggcgcgtttttcgtcctcgcggttctggcgcatccggcggatatccacgctgtcggccatgcgggtgatgggcttcagcgccttgggcacggctgcatccgccagctcccgcacgccctgcaccacctcgccgcactccacgccgcgggcagtttccacaataacgtattccccggtgtggatagcagcatcgccgggatcaaaataatagcttttgccgttttccttaaaacggaccgaaatgacttttttcatagtgttcctcgtttttgtatcggataagccccttataaggggcagctttttcagtctgctgttagtataccataatcaaaagcacatttctatgcaaaaagaaaagtctttggggggcgaactcccccagtcacggctgcgccgtgccagccccctctgagatggggcctttggcatagaggtacagtttctggtcaaaccgcaaagttcccggtcgcgccagaggctccctccccgagggagctggcaaaaccgtcaggttttgactgagggagtaaaatttcccctcccctgcaatgatacaccccgctcaaccgtatgcagtacgggaaaggtgtcggaattctgtccggcggcagaagggaggaaagcagacagaatgccggttttggggcggcaaagttgtgcgttttgcagattttgacagaactttcgcaaaagattcgccgccccgctattgaaagcatacgccttgcgtgtataataggaatgttaggaacccattgccccataaagagggaggaactgttgcgccgggcggtgcggcagagaaacggtaggataagatggaaaaattcagtgtcaaaaaaccatttacggtgctggttgcagtcatcatggtgctgatgctcggctttgtgtcgatcaccaagatgaagaccaacctgctgccggatgtcagcacaccgtacctgatggtggtcaccgtgtatcccggcgccagcccggagcgtgtggagaccgaggtctcggacgtgctgcaaaatgcgcttacggtgcccggtgtttcaaagatcaccgccacctcggccgaaaactacagcctgctgctgatgcagttcgtggatgacacggacatgaacagcgcactggtgcaggtgtccaacaaactggatcaggccaaaagcgacctgccggagaccgcactgactccttctatcgtgcagtacagcatgaacatgaacgcctttatgaccgtggctgtcagccgcgagggcagttcggtgtacgacctttctgattttatcaagaacaccatgaccccctacgtccagcgcaagggcggcgtgtccagcgtgtccgccagcggccttgtggagcagctggtgcaggtgcagctgaatcaggaaaaggtggatgccatcaacgaaaagctgatggagctcatcgacagccagctggaagcggcgcacgcccagctggaggaggccgaggccaagattgaagccggccgtgcggaatacgataagcagttcaaaaacttcggcaatatggtgtccaactctgttatgggtaccttgtcctctgaggttggcagcgccgtagaggtggtgcgcaaacaggccgaggcgctgctgcaaagcgtcaacaacctgatcgccgtggtcaaggagcctgaggtgcagcaggcactcatcgaagtgcaggccggcttgcagcgcgttctggataagttcaacagcaccggtatgcgggatatcgattctttgatcgagatcgtctcggagctgcgcgatatcaccgataagctttcctctgctttgcagaccctgcagaaccgcatcaacaccgagaccggcacgcagggcgagggcgctgcggatctggtagacgagctgcaattgcaggacagcctgaatgtcatctataagacgctggaggacaccatcaaggccatggacaacgtgcccggtatgatgaccgagttctccaacgcactgggcagctttacccagcagcagctggctgcctatatgcagtttaccgaagcccgcgagcagctgaacgagtacgaaaagcagctcaacgaggccaagacccagtacgaggccgccaaggaaaaggcgcttgccagcgccgatgtgaccaagcagctggatatcaagacccttgccaccctcatctacgcccagaacttttccatgcccgccggttacgtcaaggacgaaagcggcgagtcgtggctgctgaaggtgggcgaggaatacgacagcgtggaggatatccggggcgcactgctgctccatgtggagggctacggcgacgtgcgcctttccgacgtggcagacgtggagatcatcgacaacgccgccgacagctacacccgcctgaacggcgagcaggcttcggtgctgaaaatttacaaggacgacagttccagcgcaggtgaagtatccgccaactgtctggacgctttcaaggagctggaagcccagtacgatggtctgcacgttgtagtgctgtccaatcagggcaactacatcagcatcctgatcaagagcatcctcaccagtatgctggtgggtgccgcattggccatcatcgtgctggccatcttcctgaaggacgtcaagcctacgctggtggtcggtgtcagtatccccctgtcggtgctgtgcgccgtggtgctgatgtacttcaccgggcttgacctgaacgtcatgacgctggccggtctttcgctgggcattggtatgctggtggataactcggtggtcgtcatcgagaacatctaccgtctgcgcggccgcggcgtgcccgccgcccgcgctgcggtgcagggtgcgcgtcaggtgggtatgtcggtcgtggcctctacccttacctcggtgtgcgtgttcctgccggcggtgttctctgccagcctcatccgcagcctgatgggccccatgtccctgtgcatcggctactgcctgatggcttccctcatcgtggcactgaccgtggtgcccgccgcttcggctaccgtgctgaagaacgcccagcccaaaaagctggcatggttcgataaaattcaggacgcctacggccgcagtctggaaaaggcgctgaaaaatcgctttataccgctggcagccgctgtgctgctgctggtgttctgctgctggtgggtggtctccatgggcatcgtgctgctgcccaccagcaccagtaacgaggccatgatcaccctttccactaccgacaccctctcgcaggacgagtcctatgatgtagccggtaaggtggtgcaggctgtgatggccgtggacggcgtggaggaggtaggcattacccccgacaacaccgtggcgggcatggatgtttccaacctcggcctgccctctgccatcaccgacctgctgaacgccgccaacggttacggcaagtataagatcaacgtcaagctcaacgaggatctctcctcttccaagatcgacgccgcctgcaaagccatggaggaagccgtggcaggggtggcggactgcaccgccaccgtcaagcagtacggcatgacggatgacctgaccagccagctgtccaccggtctgaccatcaagatctacggcaccgatgccgagaccctgactgccctgtccgagaaggtcattgacatcgtgaacaacaccgatggcttccagaatgccaccaacggtctgggcgcgggtgattccaccatcatcctgcaggtggaccgcgacaaggtgcgtgcctacggtctgaccgttgcacaggtgtaccagcagatcgcggcaaagctgaccaccaccaccacggcacagacccctgttaccgtggacggcaccactatggatgtgcagatcagcaacaatctggacccgctgaccaaggaaaacatgatggacatgacctttgagaccaccgtcatgtccgcagacggcaccaccgccaccggtacctgcacactggcagatatcgccagctggaccaccggcaccgcgccggactccatcaccagcgagaaccagaaccagtacgttaccgtcaccgccgagactgccccgggctacaacaccacggtgcaggcgcgtgccgtgaaaaaggcgctggatgcctttgccctcaccgatgagatgccggaaggctgctccttctccatgggcggcgagagcgacagcgtcaactatatgactgacgagatgatccagtggatggcactggctctgccctttgtgtaccttgtcatggtggcacagttccagagcctgctgtcccccttcatcgtgctatttaccgtgccgctggcctttaccggcggtctgctgggcttgctactcaccggccagcagctgaccatgatctccatgatgggcttcatcgtgctgatgggtacagtcgtcaacaacggcatcgtgttcgtggactacgccaaccagctgcgcatgggcggcatggagcgccgcgccgcgctggtggctaccggcaagacccgtatgcgccccatcctgatgaccaccctgaccactgtgctggctatgctgcaaatggtgttcagcaacgatatggcaagccagctgatgagcggcatggccatcgtcatcatctgcggcctgagctacgccaccctgatgaccctgtatatcgtgcctatcctgtacgatatcctgttcaagaagccgccgctcaacgtggacatcggcagcgacgaggacttggacgacatcccggacgatgccgccgagttcattgccgcccagtcctctgcggcacagtctcagccggaggtataaggcgtaccagcccgtgtaaccaaagcgccccgcatttccatcagaagtgcggggcgctttttggtattgtgggcgcacgccgagggatgttctcttttgacaccaaaagagaaccagaaaagtgccagcgatttcgacgcgctggagccacgaaaaaggggctgctcgccccttttaaccccaaagaggagggctacaccggaaaaaactgaagattcacgcctgttcggcgtgaagatcttttaaccgttttttccggctccgccgatttgcagcccctcagtcgctgcgcgacagctcccctcgggggagcgggcacgcccgcaagctttgcactttagacggaaactgtgccgccatgccaaaggctccctcccagagggagctggcaaaaccgtcaggttttgactgagggagttcacccagccgccccattgtgggcactttcgatgattctaacaaaaaatcgccgtaaaaattggatggtaattctaaaaggaatccaacacaaaaccgtaaaactgtgatataatcataaatacagacaaaatgcaaaagggggcagtctgccccttttgcatttccgaaaaaagctttaggaggcgaggcccaatggcacagatccgttctaagcccttcggtgtgaccaaagagggcgctaatgttaccgagtacatcctctcgaaccccggcggtatgtccgtcagtgtgctggattacggctgcgtgatcaaaaatatcatcgtcccggccaaaaacggcccggtggatgtggtgctgggtcacgacaccatggcagattacgaaaacgacttcacctcgtccggcagcacctgctgcggtgcttttgtggggcgctacgccaaccgcatcgagaacgccgtctttaccttgggcggcaagacctaccagctggaaaaaaacaacggcgaaaaccacctgcatggctgtttttcccggaaaatctatgaggtgaagtacttcggcgataccctgctgatggaggccgtgagccccgacggcgaggatggttttcccggtacgctgaagatcgcggtgcgctataccctcaccgacgacaacaccttccgcatggactaccgtgtgtcctcggacgccgacacccttgtaaacctgaccaaccacagctacttcaatctggacggcggcggcgatgtgctgaaccagaagctgcgcatctacgcttcccgctatctggaaggcaacaataccacctgccctaccggcaatatcctgcccgtggcgaacacccccatggactttaccgccggcaagcttatcggcaaggaaatcgacaccggcttctcccagaccaccatggtgggcggcggctacgaccactgctatgtcatcgaccgcgcacgcggctccagccagagcatctgcgcatgggctaccagcgataagaccggcatcagcatgaagctgtacaccacccagccgggcatccagctgtataccggcaactttttgcaggactgccccgccccgggcaagggcggcgagcccctgcgcaagtacggcggctttgccttggagacccagcactatccgtgcagcccctctcacccggagtttccctccacggtgctgcgcgcaggcaaggtgttccgcgccaccaccaccctgcggttcttcaccggcaagcagtgcggaaaactttaaagaaagatatatcacgcaaaaaacgtctgctccggcagacgtttttttgcgtggctgcccccgcagcgatgacggaaggggtatcctccctctccatttctatgttttgcacaaacggtgcattctctccatgtgaataatgcgaaaaatctctgtcaatcaaatgtgtgctgtacgaatatgcaacaaaaatatatctgaataaagaaagcgccccttgcagtcggcggcaaaaagcggtattctttaagcagaccgggcagcgcccggcgcaaagagataaaagtgataatactatgtgagagaggtactcggctatggcaattttggtttccggcggtgccggctacatcggcagccacacctgcatcgaactgttgaacgctggctacgatatcgtagtggcagataactattataacgcttctcccgtggttctggatcgggtcaagcagatcaccggcaaggacttccgcttctacaatgcagacatgacccgccatgaggatgtggaaaagatcttctccgagtgcccggacatcaccgccgtcatccagtttgcagcctacaaggctgtgggcgagagcgtgtccaagcccatcgagtactactataataacctcaactgcacgctggtcattctggacgtgatgcgccatcatgactgccacaacttcgtgttcagctcctccgctaccgtctacggcgaccccgccagtgtgcccatcaccgaggacttccccgtgggcgctaccaccaacccctacggcaccaccaaggctttcaccgagcgcattctgcaggacgtctgcaaggcggaccccagcctgaatgtggcgctgctgcgctacttcaaccccatcggtgcccacaagagcggcctgatcggcgaggaccccaacggtatccccaataacctgatgccctacattgccaaggtggctgtgggcaagctggaaaaggtgcacgtctttggcaacgactaccctaccccggacggcaccggtgtgcgtgactacatccatgttgtggatctggcccggggccatgtgtgcgccatccgcaagctggagaccggctgcggtctcttcatctgcaatctgggcaccggcaagggctacagcgtgctggatgtcatccacgccttctccaaggcctgcggcaaggagatcccctacgtcatcgatccccgtcgccccggcgacatcgccgagtgctacgccgaccccaccaaggccaagaacgagctgggctgggtggctgagtacggcatcgaggagatgtgcgccgacagctggaactggcagaagaacaaccccgatggctaccataccgtgaagtaacttgtaaaaaacggagcaccgcatattctcgcctgagaggatgcggtgctttttttgtgtctatattctctattgacatccgctgccagttagcctatactacatttgttaacacagactaacacacaggaacagtacatataaaagaaggcaacggatatgacgttaaaagagttacagatcggcaaaagcgccatagtagatgctgtgggcggtgcgggcgcactgcggcagcattttctggatatgggtctgatccccggggcagaggtcacgctggtaaagctggcacccatgggcgaccccatggagctgcgcatccacggctatgagctgaccctgcggctggatgacgcggcacagatcaccgtgacccccaccgaaaagaccccggcggtgcacgccccggtggcggaaaagatggtggagcacccgggtcttggcgagggcggcaagtaccacaccaaggagggggagcatcccctgccggaggataagaccctgacctttgcgctggcgggcaaccagaactgcggcaagaccaccctgttcaaccagctcaccggctccaaccagcacgtgggcaactttccgggcgtgacggtggaccgcaagagcggtgccatcaagggacacccggagaccgaggtcaccgacctgccgggcatctactccatgtctccttattccagcgaggagatcgttacccggcagttcatcatcggcgaaaagcccaccggcatcatcaatatcgtggatgccaccaacattgagcgcaacctttacctgactatgcagctgatggagctggatatccccatggtgctggcgctgaacatgatggacgagatgcgcggcaacggcggcacggtgcgcatcaacaagatggaagccatgctgggcatcccggtcatccccatttccgccgccaagaacgagggcgtggacgagctggtagaccacgccgtccatgtggcaaagtatcaggaacgtcccgggcgcatggatttttgcagtgaggacgaccacggcggcgcggtgcaccgctgcatccacggcattttgcacctcatcgaggatcacgccaaggcggcgggcatcccggtgcggtttgccgccaccaagctggtggagggcgacccccgcattgaggaagccctgaagctggaccaaaacgaaaaagaaatgatcgagcatatcatcgtgcagatggagcaggagcgcgggctggaccgcgccgccgccattgcggatatgcgcttctccttcattcaggagctggtggcgcagacggtggtcaagccccacgagagcaaggagcagctgcgctccaaccgcatcgataagttcctcaccggcaagtacaccgccatcccggcatttatcgccatcatgggtctggtgttcttcctcaccttcaatgtcatcggcctgttcttccagaacctcatggagatgggtatcgatgctctgaccggcgttgtggacaccgccctgaccaactggaacgtcaatgcggcggtgcactcgctggtcatcgacggcatttttaccggcgtgggcagcgtgctgagctttctgcccatcatcgtggtgctgttcttcttcctctccatgctggaggataccggctacatggcgcgtgtggcctttgtgatggataagctgctgcgccgcatcggcctgtccggccgcagcatcgtgcccatgcttatcggctttggctgcaccgtgcccggcgtgatggcaagccgcaccctgccctcggagcgcgaccgcaaaatgaccattctgctcaccccgttcatgagctgctccgcaaagctgcccatctacagcctgtttgcggcggcgttcttccccaagtacgcggggcttgtgatggtgctgctgtacttcaccggcattctggtgggcgtgctggcggcgctgctgctcaagagcaccgtgttcaagggcgaagccgtgccctttgtcatggagctgcccaactaccgcctgcccggcctgaaaaacgtggcgcagctgctgtgggaaaaggcgcgggacttcttgcagaaggcctttacggtcatctttgccgccaccatcgtcatctggttcttgcagaactttgatttgcagctgcggctgaccgccgacccgcaggccagcattctggcgcgcatcgcgggcgatatcgccccgctgttcgccccgctgggctttgcggactggcgtatctccaccgccctcatctccggctttatggcaaaggagagcgtggtgtcctcgctgctggtcctcttcggctctacggctgccctgaccgcagcccttaccccggcgcaggccgcacccttgctggtgttctgcctgctgtacaccccctgcatcgcggcggtggcgtcggtcaagcgggagcttggcggcaagtgggccaccatcatggtggtcaaccagtgcgccgtggcatggctgtgcgccctgctggtgcgcctggtcgccgtggcggtgttctgagaaaaatgatttgaatgcgctccgcgttcgctttgcgcatattcagcggaaagaatatttttaattttgggtttcaggaaagtctgcggaacttgtcggggcaaagcccctccatctgctaacgcagaccgctccgccgcttgaaagccccactggggctttcattgctgcgcaaacgcggactttcctgaaacccttttttacggaaaaaactcccccagtcaaagcctaacggctttgacagccccctcagggatggggcctctggcgcgcccaaaaactttgtactttagctgcaaactttgccgccatgccaaaggctccctccttgagggagctggcgcggcgtaagccgcgactgagggagttcccccttgacatctcccctcatctgtactataatacttcaaaaatgaactgtctatataagaacaaaaggagcgccgcatgaaccctaccatagagatcagcttcaagactgcgcaggcctacaacgccatgtgcaagccgctgtgtcaggaactcaagctgccccagaccgcctttgatatcctgatgtttctggcgaataacccggactgtaccaccgcccgggatatcgtggagatccgcaaaatcaaggcaaatctcgtttcggtgaacgtggaccgtctggtgcaggaggggtatctggagcgccgcgccgtggcgggcgaccgccgcaagacccagctgctgtgcaccgaaaaggcgcagccggtcatcgcacgggggcgcgaggttcaggagcgcttttttgcccgcctgctggacaacacggacgctcccacccgggaggcgtttttccgcaccatggaggtcatcgggaaaaatctggacgagatcttaaaggagaatggataaaatgcacttgctgtttacggtgcttgtcaccttttttgccggcatgggtgccggcctgggcaccggctttgccggtatgagcgcggcggcggtcatcagccctatgctcatcacctttctgcacatggacccctacatggcggtgggcattgccctttcctcggatgtgcttgccagcgcggtgtctgcctatacctaccataaaaacaagaatctggacatcaaaaacggcctgatcatgatggccagcgtgcttgcctttacggtggtgggcagctgggtggccagcaaggtgccctccgccaccatgggcggcttctccgtgttcatgaccttcttgctgggcgtcaagttcattctgcgcccggtgatgaccaccaaggaagccatgcagggggtcagcgcacaaaagcgtgcggtgcagtcggtggtgtgcggcgtgctcatcggcttcatctgcggctttatcggcgcgggcggcggcatgatgatgctgctcatcctcaccagcgtgctggggtacgagctgaaaactgccgtgggcaccagtgtgttcatcatgacctttaccgccctgaccggtgcggtatcccactttatgatcggcggcacgcccgattggctggtatgggtgctgtgtgtggtgttcaccctgctgtgggcgcgcattgccgccgtatttgccaacaaggccgcccccaagaccctgaaccgcgccaccggcgtcgtgctggtagtgcttggcatggtcatcatgggctttaatctcttgacctgaaaaacgatttaaatgcgctccgcgctgctctgcgcatcaatagaggaaaaacaattttaaatttgagaaccgggaaaatctgcggattttcccggttcatttttcatagaagggaatgcagttctcctttacggcctttcccgtgaaaatgcaatgccgggcgatccgcagaccgcccggcattgctctattaaaaataataattccgctgtgtgtgcgcaaagcgaagcggagcgcattccaaaccgtcagcgcttacttactctctaccttttcctcgatggtggagtggtcgatgacccagtcggcagccttgcggatgccctcgttgcggcgcagagcagcgatatcggtgcctgccttgatctcttccaccgtctttttggtcttttcggcgcgctcagccagctgcttgtcgatctcctcgtcagtgggcagcaggctctcctgctgtgcgatctgcagcagtgccatgcgggcgcgggtgttcttttctgcggcggcacgcaccttggcagtaaagctctcgcgggtctcgtggatctggctcaggtaggtggtcaggctcatgcgctgcatctgcagctgctgctggatgacctgcatctgctgctggtaggcgttttccaccagaatgctgggaatctcgccctctgcggcatcggccagctgaccaaggatcatgtccttggcgtggttcagcgcaccgccgtgacggccatcgaacagctgctgcttcacgaaagcgcggtactcctccatggtctccttgcccatcttcttggcgaaatcgctgttcagggcaggcagctgacgcacgcacacgtcatgcagcttgatcttgaacacgacaggcttgcccgccagctccttgttggggtagttctgggggaaggtgacgttgatctcgaactcgtcccctgccttgtggcccagaatgccgtcctcgaaaccggggatcatgcggccgctgcccagctgcaccgactggtcctttgccgtgccgcccttaaaggccacaccgtccagaagaccctcaaagtccatgtgcaccacgttgcccttcacagcggggcccttgtggggcaccagctctgcggcgtaattgcggcggcgctccagcaccgtgtcgatctccttgtcggtcacctccggggtgacgcactgggaggtaaagccggtggtcttggtcagcttcagctcgggctgcagcgccacggtggcggtagccacaaagccctcatccttcttcacgcttaccagatcgtagctgggatcatctaccggcgcaaagccgtgttccttcaaagcagcctcgtacaaagcaggcacatcctgatccatcaggtcgttgatggcatcgtaccagaaggtgtgctcgccgcggtcagcctcgatctgtgcgcggtcggcctcgcccttctggaagcccttgatggtataagtggcgcgggtgcgctcatagaccgcattggaggcggtctccagttcctcagccgtagcgctgaaggtcattttgcagacactcttttcaggagtttccacgcttaccagtttcataggatctaccctccgtgttgttcccttggcggcggggcggcgctgtcaaggcagcagccggaacgccattttggggacattttcaaacattagtaaagttattatagcacaagtgcagcaaaagcggtataataaacttgataaaaatgtgccgttttggcaatttttgtccattcaaacaggaaaaaagcgcgttttgcggcagcagctgccgcgcaaaagtgggaaaaccctcaggaaaggaaggctgtcccctatgcgattatttgatgttctgggcccggtgatgatcggaccctcctccagccacaccgccggtgcggcaaagatcggctataccgcacaaaagcttctgggtgaggtgccggcgcgggcagacatcggcctgtacggcagctttgccaccaccggcaagggccacggcaccgaccgcgcactggtggcggggctgctgggtctgcgcccggacgacccccgcctgccggacagctttgcactggccgcgcagcgggggatgcagttcagcatccacccggtagagctgcgctctgcccaccccaacaccgccgtgctcaccctgaccagccgcaccgggcggcagctttcgctcaaggcggcgtcggtgggcggcggacgcatccgcgtcactgaaattgacggtgtaccggcggattttggcggggacagcaacaccctgatcatccacaacgaggacacccccggctgcattgccgaggtgaccatggcgctggcactgcggcgcatcaatatcgcgtccatgcaggtgttccgcgccgctgcgggcggttatgcggtgatggtgctggagtgcgactcccacatcccccacgcgctggagcggcagctggcggtgatgccgggcctgctgaaggtgacctgcctgaacgtggacgagccggaagaaacggaggaatgagccatggcatttttgtcctgtgaagagatgctggctaccgcccgcagccagaaaatttcgctggcagaagcggtgctgcgcagcgatttggaggagagccgcctgaccgaggcgcacagccgcgccgccatgcggcatctgtggcaggtgatgcaggccaccagtcaggaatacgaccccgcgcagcgcagccgcagcggcctttccggcggcgatgccgccaaggtggagcaggcgtggcagcagggacgcctgctgggcgatgactatctggccgcagtaacagcggaagccctgaagaccgccgagtgcaacgcctgcatgaagcgcatcgtagccgcgcccacggcgggcagctgcggggtgctgccggcggtgctgctgccgttggcgcgcgccgggcaggcagacgaggacgccgtctgcgatgcattgtatgtagcggcaggcttcggacaggtcatcgccgcccgcgccacgctggcgggcgcagagggcggctgtcaggccgaggtaggcgctgccagcgccatggccgccgccgccctgtgtaacctgaagggcggcaccccggagcagtgcgccgctgccgccgccatggcactgggcaacctgctgggtctggtctgcgacccggtggcggggctggtggaagtgccctgcatcaagcgcaacgtggtgggcgcggtgaacgcagtctcctgcgccaacatggcgctggcgggggtggactatgccatcccctgcgacgaggtcatcgatgccatgggtcgcgtgggcagcctgctctcccccgacctgcgcgagactggtcagggcggtcttgccgctactcccaccggcgtaaagatcgcccgccagctggcgcaggaggattgagcgctgcacctgccgtatcccccgcccgtcgggcgaaaaacggctgtaaatgccgctttttgcgccgggacagtagaaggcttatagaaaaaacacagtaaaatcaaagaaaagacgttctttttcggaaaatataaaattattttaaaaaagctgttgacaaaccccgcacttcgtgataaaatacatcatgttccgaacggaacgtatgcgttggtagctcagctggatagagtgactgactacgaatcagtaggccgggggttcgagtcccttccatcgcaccagaaaatgccgtgaaatcgaaagatttcatggcttttttgttttgtaagccatgggtgcacggtttctgcacggtttttgcacggtcggtgttttccatgtccgatgatgtagggcgctgtattgcattgcaatcagtgcccttttttgcatcaggtgagcagagctaagcggagctttgccttcatttccgggtcggcatccttcagcaattccaaaagagccgtcatggagatggtaggttcgcctgcggcgggtacagcctgcgggctggaggtgtcgggcttggcatagaagccgctttcaaacttcttgcccagctccacacgggaggactgctggatatgggcgtaggtgttcaccagcatatccgcactggcgtgaccggtagtcccctgcaccgccttgatgtcaccgccagagatcatcaactggtaggtggcactggagtggcgcagaccgtggaacacgatgcacgggaactccgggtgtgcgtcctgccatttcaggaactttttgcggatgagcaccggctccaccgccagaccgttggggagccgcagcagcatcccgctgttgcggtaccgctccgggtcgagggcttcttcccttttcagccgttccagccactgcttcagctcctcccgcagggcggcggtcatgaagatggtgcggcaggaggatgcggttttggtgtccttcaggatgagggaggtcttgctgccctccagcttgtccgggaagatgcggaggatgcagcccttgtccacctgtgccagcgtgtccttctgcacccgctgcatggaacggttgaccgtgaaggtgcccatgccgttggcagcatcaaagtcgatgtcctccggggtcagacctgccacctccccttcccgcagcgcacccaccagcgtcaggtgcaccgccagatgcaggatggggtcctccatgctgtccagtgctgcccgcatctcgtccacctcccagatgctgcgctcttgggttgtctttttgggagcttccaccgggacggggcttttgatgaggatgccccactccaccgccagcagaaaggaattgtgcagaagctggtggacctcatggagggtagtgccggagagggtgcgcttctgctgcttgggcgagaggtctcgccgcttgccgcccacatactgtccgcaaggggtcttgctcagggtgtcgtacagggcttcgatgtggtagggtcgcagcttctgcatctgcatctccccgatataagggatgatgaggttctggatgagggccagattggactggtaggttttcggtgcccacttgtgcttgctgcactgcttgggcagccagtccatcaggaactctgccaccgtcacggcggacgggatcaggaaattgccggtcgccagctcatgctcgatctgcttctggcgtttcaccgcctcctctttggtgggaaagctctcccatttgtcgcagctcttgccgtgctcgtcctgataggtgtagcggacactgtaagaactgccgcgtttcgtgatatatgccatagatttgcctccttatcaagctgcccggtagagccatgcatcgaagctgtctttcgggatgcggatgcttccacctgcccgcaggacacggaactcggtggtgctgttgcacaggttgtaggcggcgcgctggctgatggccagcatctgtgcgacctctttcaccgtatacaccagctttgtggtctcagggctgttggtcggagacttgacggcattggttcgagtgaccacctccattgtagccggatcagagtccgactgcaaggactttttcgtataatcttcaaatttcacagatgcgttcttctcaaaattcatatccatatgcttttctccttacacttcatgacgcaccacaggctcctgcgtgcggttctcataaaatcgaatgacctccggcgggatgctgtccagtgttttcagggcggcttcatagtcctgccgcagcttggcatcctccagacgcttcaagacgctcccttccttcgctttgtccagcgaggcagagagcgtcttgttcttctctttcaacttttcgttttcggcggcagtcttggtgaaggctacgttgtactttcgcagctggtccttcatccgtgccacattgggaatatagctgtccagcaccttgctgatctccgccgcacggctcttgccgttgaagggggtgatacccaccagcagggcatccaactgctccttctgcttggtcagctgggtcatctccttgaagatgcggggcgggatgtgctctcgcccggtctggctggcgctttcgccacgctccagttccggatactgcttgaccatgtgctgccagaactcgtcctgccacttcacaaggttcttgcggttgccgatgatctccttggcactcagccgtccgtcagcagtcagaggcacaaagcagaggtgcaggtggggcgttttctcgtccatgtggacaacagcagagagaaaggtatccgggcactgtctgccctccaaaaatttcagggcgtacgcaaagtacgccctgatctcccggttggtcttatccttgaaaaactccgggctggcggtgacaagcgcctccaccacccgcacgctgtctttgcggacacggcagtgggcggcggctatcatgcggtcggcttcttcccggtacctgccctgcggctgcaccagatggaggttgtagcggctccggctcgtgtcgatgtccgggttgctggcgtactgctccttggtgcgctcgttgtgggcttcaatggggctgatggcaggccctttgtactttttgaatcttaaaatgccgtattgggctttcatagatcacgctccttcttggggtgtacaaaaaatctgtacggacttcaaataacctgtacggtctgtacggcgtacggcgacataaaatatacacgatgatgcgtcttaatttgcttcaattcgccgtacaggtgcgtacaagtacagaccgtacaggttgtacgaacttcttccgtgaaaaaatgcactttttacgggcaggggtggacaagcggcttgatgcctacaaaaccccgcaccctgcggccaccgggcaggtagatgttgttggtggcttcaaggttatagcggcggtcattctggcgcaactctgcgctgaaacggatcgccgatacgctgtggcaggcgttgtcctcgcaccactgcttgtaaatgtcgtagaactccttggaactgatggagtagtccgccttgaagcggaaatagccctcggactccatgaagtcgatgacattgttgctgctgcgtttgatggtgtccacgttggcagcggctcgttcgctgaccgtgaagcggaaatcgttctgcaccagccgatgcagcccttccagacaccacagcagaataccctccaactcggcgcacatcttctccacaaggaaggggtcatccgtgcggtcagcaggcttgtccttagtggtcaggatgagctggcggcgaaagaaaccgtccgaatggtcatacagcgaggtcaatgcgccgttgccgaagcagaggaaccgggcgtagatgtcccgctggtagctttggacacccttgcgctccaagtccagtttggcttcggcggtcacgatggtcttaatataattcgtcttgggcagggcgttcatatccatatcatcgtcgatcatcagcaggcggcgttccagatcagcgcgggcaaagcggttgttctcgactttctggacgctgccattgctggcggcatctcccatgagccgtttgagcaccagcccgatgcgggatttgccctcgccgcccttgccgacaatgagcatcatcttctgccctttggtgctggggatcaggcagtagcccagatattcctgcaaggtggggatgtcagcatcgtccagcagctcgtgcaggaaggtcagccagcggtcaggggtggcagctttcgggtcgtatttcacaggcagacggttctggcagaacaggcggctttcctgaaaggtgccgtccggcagatggtacacgccgttctggagatggatgcagtcctgctcgatggggaacgggtcggaaaaggccagcagcttgatggtctccagaatgttggtgacttttttggacaggccggaggtgacatattcctcgatgttctctaagatgcgctgcttgatctcgctttcgtcctccaccgggccgtccagcgtgtacagcgtaccgttgacgcatttcagcggccactgttccagaaaggcgcggccaaactggacttcatcgatcttcttaccgttgtaccagtccggccataaagggttgcgggaaatgtttttcttcatgtggtggttctcctttaaaaaagtaaagtggtgattatcataatgataagcaccactttaggtgaatgaatcgtcaggcgcactttgccagagcaaggcggtcggtgcgctcctccagcatcagcaggtacgacccggacagcagctgtgcggcggcagcggccttctgctggggcgtcccaaatgcaacgcagtccgtcaggtgctcgatggtctcggtcatgtggagggcttcttcaaaccgtgggtcatgcggttcctccggggtggcaggcttgtagcgctcctgccagtggtgcaacaggtcaagataatcggtcagcacccgcaggcagtaggcgatgtctgcccactgctcgtccgtcaggccacgcttgggtggcggcagggcaatggcattggcgggcggcttgtccgggtcaagcccgaagtcatgcgcgagtttctcggcggcttgccggggattcaggtcgaacagcttggcggtgaggtcgatggcgtcaccattggctccacagccaaagcaataataataggtgtcgttcagcatcatactggggtggttgtcggagtggaacggacagcacaccatgccatggcggtcgggctccatgccgtacatctctcccacctgccgaacggtgatggcggacttgatcttttgatataaactcaaaatttctcctttgctcaaaggctctggcacggatcaatttgatccctgccacgttcaaagtcaccggtgttccccaagtgggaacttcggtgaagccggtctcccttgctgccttccgacaggaaatctttttggactctgtgtcggccccatgcagggcgctcgctcccccgatgggaggtcttggcggtctgggcagttcggacggtcattctgttctcaaggttctgttatgaaagatatttcagagggctttcgcgggaagcccttaatatgttcgctgctggggagttaatatgttttctttctgtctataggatagcaccatgatggccgctgtgccgtatatccataatgtcggaaaacaggtgcagaaactgcaaaattccacgcttatggacaggaaccgctggaagtggtatactgtgcaaaaaacatcggaggtgcgaccatgaacatcaagctgacactgggagaacggctcaaagacctgcgtgtggagcggaatctgaagctggaaacgctggcagagcagacgggtctgtccaaatcggcactgtcgaaatatgagagcgacgatgtgaccgacctcagcatttatgcggtgacaacgctggctgagttctatggcgtgaccacggactacctgctgggggtgacggaaaacaaaaaacgcccagatgcagtcctttcggacttgcatctgagcgatggcgcagtggacgtattaaggaatggaaaattcaatcatcggctgctgtgtgagctgatcgtgcatgagaattttcagaggttcatgaccgatctggaaatctatgtggacggatatgtcagcgcaaacattcaaaacctcaatgctggtctggaagcgacccggcaaatgctgaaaaagaagtatgcagcagatgaaaacgatttgtacatgagcaccttgaagctggggcagatcgatgaagatgagtactttggccgggtcttgtacgatgagttggtggccatcctgaagaacatcaagacggaacaccgcaaggacaagaccacttcggatggttcaatgatcgataacctgatgaaggaactggaggatgcacagaaacatgaagggtctgcggatgaaaagaagatccgaacggcattgaaggcaatcggcatcaactacgataagctgacagaggatgaaagaaagctgataaagaagatcctttataaaacggcaatgctgaaaccggggacacttgcaggcaaccggggaaagcacagacgttgattatttaccttgcggcttataggggaaaaacgctgctgcggcaggacaggagaacgtacaccattggttcctctgcaagcctgcgctgggtgggcaaagaccgtcaactgccacgcccatccgcgcatccttctgccgcagaacaggtgcttgccggagcctctcgcagccccttttccgcatcagccggaaccaaggtgtaacacactagactttgcaagcaaagtcgtgtgccaacgagcgttccgccgctctttggattcttcccggcagggcactggaaaatggggtgccctgtgcagcacggggcgcatccgttacctcgcacaaaaaattgactgcaagttttacttgacaattcgcggaatatgcactatcatagccataagatgaatataatgtttataacgatatactcaatttgagggtgaggtatttcatggcgatcaatgatagtgctgtcgtcccgctttaccagcaggtaaaggatgacattcgtgccgcgatcgagagcggcaagtacaaaaccaacgaaaagatccctccggagccggaactgagcgcggagtattcggtcagccgcatcacggtgcgccgtgccgtggaagaactgtgcgccgaagggtatctggtcaaaatgcaggggcgcggcacctttgtcagtaagccccgcatccatcgcaagtttaccagcggcagaaatgctgccagttttacggagacctgcaaagaaaacggtatggtgccgggtgcccggctgctgaaccgtcagatcgtgccggtgcgtaaggatgaggaagccttcttccatgtaggcccggaagccttgctcatctatatccagcgtctgcgcaccgccgatggtcagccggtttttctggagaacctgttcctgccctacgagccttataagaacctgatgagcgagaacctcaatgatgtttccatgtttgacgccattgagcgcatctccgggctgcgtcctgcgacgaccggccgtcagcgtatagaggcagttcgcgccacagcagaacaggcacagctgctcaacctttcgctgggcgagccgctgctgtatctgaacgcctacttccatgaccaatatgaccacccgctgtgcatcgggcggcagtattacattggaagccggtatatgttcgagttttaagggcagcattctgtcccccaagagcgtcttttccacccggaaaagacgctctttttgtcgttccaaggagaattgttggtgaaactgctaaaatatagggggaacgctttgtgcacgtcaccaaagctgagattattttaacaaaacctcttgacgtctgcgtgaaatgtggtactatgtacatgacgattatgacgtctatgacgagtaagacgatacagacgccgaagagatgaaggaaacacaagaaaggtcgtggatgcgtatgaaccgaatcattcttgcttcgcacggagggctgtctgccgggatgaaggacaccgtgcagatgatccttggcgagatgccgaacctttatgcccttgctaccctgcgggatgagaccgagcctatcacggtagcggcacgccggctgctggagggctttgcagcagaggatgctgtgtacatcgtgaccgatgtgatgggcggcagcgtgaacaacgagatgctgacccttctgccggagtatccggcggtgcacctgatctgcggcatgaacgcttctctggtgctgacccttgcttccaacgacgaagccctgacacaggacgaactggccgagtgcattgcagatgccaaggcgcagatcattgattgcaacctgctgctgaaaaacgcagcccaagatgaggaggatgacctatgatcaaattagtacgtctggactaccgcctgctgcacggtcaggtggtattctcgtggaccggccatgtgggcgcacagcgcatcatcgtggtggacgatgacgctgccaacgacgagatgaaaaagtccgccctgctgctaagcaagcctgccggtgtccgggtgaacatctttacggtggacaaggccatcgccaagatgccaaaggtggagcagctggacgagaagatcatgatgatcttcggcaacaccgctgcgctgctcaagttctgccaggcataccccaagatcaaagagatcaactacggcgctgtggcaaataagcccggctccaaggcctttgaccagtcggtattcctgaccccggaggagcaggcagacacccagaagctgctggatatgggcattaagatctacagccagcagacccccacctttaaggtagtacccatcgatcacacctgatcgtaaggagataagaaggaggatttgacccatgtttgttaccgcattgcttctgggtctggttggcgtgttctgtattctggactcgcgcattctgggccgcatgaacttcgagcgtccgctcatcacctgcaccatcgtcggtgcgctgctgggtgatctgcagaccggcctgacccttggcgcatccatcgagctgatgagccttggcatcgtgaacatcggcgcagccgcacccccggacatgaacatggctgccatcatctgcgcagcttttgccatcctgaccgatgcttctgccgagactgcactggcgctggccatccccatcgctgttctgggccagatgctgggcgtgctgatgcgcaccatcctgtccaacttgacccacgttgccgaccacgccattgcagaaggcaagttccgcaaggcatggagtatgcacatcgtctggggcacagtgctgtacagcctgatgtacttcatccccattttcctgtccgtctacttcggcacagatctggtgcagaagatcgtggctttcatccccgcatggctgaccgatggcctgaacctcggcagtaagttccttaccgcttacggtattgccctgctgctgtccaccatgctcaaccgcgacctgaccgtctacttcctgttgggcttcttctttgtgggctatctgggtctggatgttaccgctgtggcaatcttcgccgcaattctggctgtgatcctgaccggtctgaagtatggcaagggcgcacccgccgcagccgctgccggtgcagctgctgccaacccggattacgacccgctggaagatgacgacgatctttgataggaggaagctgaaatgagcaacgcaaccaagactgcaaagcgcagcgacttcaagaaatacttccagtttatgtggcgttccctgaacattcaggcctcctggaactacgaacgtcagatgaacatgggctttttgtacggcatcgctcccacgctggacgagctgtaccccaacgagaacgaccccgagcagctggcgcacaaaaaggaagcctacgagcgtgagatggcgttctacaactgcaccccccagaccagtgcctttacgctgggtctggctgcttccatggaggagcagtacgccgctgaccgtgagaacttcaacccggagaccatcaacgccgtcaagacctcgctgatgggccccctgtccggcgtgggcgactccttcttccagggcactgtccgcctgatcgcttttggtctgggcatctctctggcacagcagggcagcgttctgggccccattctggctatgattatctccatcgtcccctctgtgctggtcacatggtttgccggtaagctgggctacaccatgggcagcaagtacctgaccaagctcaacggcggcatgatggacaagttgatgtacgtctgcggcatcgtaggcctgatggtcattggtgccatggtggcaagcatggtgggtttgactacccccattaccttcgcaagcaccggtctggtgctgcaggatgtgctgaacagcattctgccgaaccttctgaaccttggcatcgtgatgctgatgtacaccctgatccgcaaaaaggtcaagaccggctggctgctgggcatctgcatcgtgggcggtgttgccatcaacgcccttggtctgttggtgtaaccgggtttccggcttacatagatatccgtacgcctgtaatttgtgattcatcagaacaaaaagaaaaataatttggaggattgcattatgtataacattgatctggcaaacgtcaagtccatcgtggcagacatcgtggcaaagcacaacgtggagaacgtggcctttgttggctgcggtgcttccaaggcagagctgtaccccgcaaagtacttcctggcaaactgcagcaagaagctgcgtgtggcacactacaccgccaacgagttcaactacgatacccccgattggctgggcgacaccaccgtggtcatcaccgcttctctgggcggcagcacccctgagaccgtcaaggccaacagcgtggcaaaggctgccggtgcaaccgttgtcagcgttacccacgctgccggttctgccctgaccaaggaagctgactacaccatcgttcacggctttgaggcaaactacgctgccaagctggagaagatgggctacgttctggcactggctgtggagatcctgcagcaggtggaaggcttcgacaagtacgacaagatgatcgagggcctgaccaacgtgttcgaggctgccgagaacgctgccaactctgcccgcaagtctgccaaggagttcgctgagaagtacaaggacgctcccgtcgtctacgtcatgtccagcggcgcttccatggaggtcgcttactccacctctatctgcctgatgatggagatgcagtgggtcaactccggctccttccacagcggcgagttcttccacggccccttcgagatcgtggacaaggacgtgcccttcatcctgctgatgaacgacggcaagacccgtcccgtggatgcccgcgcactgaccttcctgcaccgcttcgatgctctgaccactgttgtggatgcaaaggattacggtctgggcaatgctgtggacagcagcgtcatcacctacttcaacccgatgatgcacaccgccgtgttccgcgtctatgctgaggagctgtcctacgtccgtcagcatccgctgaccctgcgccgctatatgtggaagctggagtactaagcgatcgactgggatcaatagacccatgcttgggggaggggcttgcccctccccttttttgatgaagagggaaatgaagaatgattgaagcagtgatttttgatatggatggggtgctggcggatacggaatactactacgagaaccgccgtaaaaactttctgctggaaaacggcatccccatcccggagggcaacttcatcggctccaacgaaaaagctatctgggaagccattgtccccaacgaccctgtgcgccgtcaggagatgctgatggcttaccgggagtaccgcaaggctcgccccaccccctacggcaagctcaccgacccgcaggcagagccgctgatgaatgcgctgcgcagccgggggctgaaggtggcggtggcgtcctccagcgcagcgccggatatcatgaagatgctcacggagggcggcttgaaagccatggtggattttgctttcagcggcgaggactgcgccgcccataagcctgcgccggacatctatctcaaggcgctgaaggcactggggctgacggcagacaaggccattgcggtggaggattctcccacaggcattgcctccgcaaaggcggcagggctgaaggtgctggcactgaagccccgccacggcgagccgctggaccagtccgccgcagactgcatcatcacccagctgatggatgtaaaggagcatctggactgagatggaagcgatcaagaacggtctgcgcaaaaacctgaccccagcacagctgtggagcggcgcacgcttttttctgctgctgaatctgggacttatcatctatgcagtagcactgaacttttactgtgcgcccaaccactttgtatttggcggcaccaccggtctttccatcgttctggccacctgctttccggctctgagcgtcagcacctttatgtggatcaccaatgcggtgctggatgtgctgggctgcgtctttctgggcataaagaccatgggttggacactgtactcctccttcatgctcagcttttattccagtatgtgcgaaaagatgtttcccgtgtcgcagcctttgacggatgatactctgctggagctgtgctttgcggtggcgctgcctgccattgccagcggcatcgtattcaacatcggggcatccaccggcggcaccgagatcgtggcgatgatcctgcacaagtacatcaaggtagagatcggcagggctctgctgctcagcgatatcggcacggtgctgtttgcggcttacctctacggcccgcagaccgggatgtactgcgtgctgggactcatcgggcgcagcaccatcgtggatacagccatcgagagcctgaatctccgcaaggtgtgtacggtcatcacctcaaggccggagcccatccggcatttcgttacggaaacactgggacgcacagccacccagcagaacgccaccggcgtgtacaccggcgagccccgcaccatgatcatggtggcgctgacccggcggcaggcagggctgctgcgggatttcctgcgccgggaggacccggcagcctttctgaccattgtcaactccagcgagatcatcggcaaagggttccagtccatctgaaaacgcagaatgcccgcccactgtggcttttccacagctgggcgggcatcatttatatggtaaatggttgtttacgctgactttccgggatttacgctgaaaatacgctgacttggcatggtttacgctgaatttacgctgaaaacgcgcaatcgcgcgagcaaagcgcgaataaatccagctaaccgcgaataaaccgcgaacaaaaatcgcacgggcgtgcattcttcatgcgtgggaaggtgcgacatgaaagtgagaacctgcaaaaataaactgtaatacgattgaatttcggaaaagtgaaatcgcacgctggaatgcacgccgtgcaattcagtctgacaagaggtggaaagaaaaacgcgcgccgcgcgattagcgattttgccgcgcgttttctgcggctcaatcttccagcctgccgtggtcacagccgagggaaagataatgctccatctcccctctcagcaccatctgtgcgtactccaagggcttattatacagcagccagtccagttctgcccgctgtgccggggtgttgccgtactcgtcctccacggtaatgcagtcgatgacaacggtggtgccatccgcgaacagggcttccacccggttggtgtccatgttgtagcggcaggaaagcaattttgtcatagtcatatcctccaagacttgatttttggtgtgcagtcactcgaaccaatgccgtcaagtcgttgtcggatgaagtggtttttagtttgtccgggagtaagtgcacggtttctgcacggtttttgcacggtttcaaaacgtgcaaagggtgcaaatcgttgcaaaatcggacaaagggtgcagaaactcgaaactaaaaatctgcgatgtatcgccgagaaataacggtaaaacgtaacttccaaaaattgagagaatcgcccggcgtgcgctacgaatcagtaggccgggggttcgagtcccttccatcgcaccaaaccatgaaaatccgaaccttttctcgataggagaagggttcggattttttgttttcttcggaaagcaaaatgaaggctccttcccgacggctgtgtgtccaaaaccttatcagaagaaccgtataacaaaagtcacaactgtaaaggtgccgtaaggcggaaaggacacaaacatgaagtacgatgaaagagcctgcaagttcaacatggataccggctgcgtggagctgctgctccgggatgggagaatgatcttcattgactgcactggggtcgaggatgcactggacgtgaccatggcgcagaggtcagagttagactacctcatctacaatgacccactgggctatgccgatttgattctgaacggagacccggagaaatacctgaaaaatgtaaacgggagccatgggttagaagattaagcagagaaagagcagaagcattttcaaaatgctcctgctctttcttatacctgttccatcaacttgatgaatgcttgtgcatagcgcggcagatagtcaccggtgcgccatgccgccaccgattcaatatgaagtgtacagttttgtaaaggataggctccgaaaggaatattaagttccagatgttccagcagttctccgctcaaaaatccaactccataaccattcgccgccagtgcagccgcagcacgaatattactgctctctaaaatctcggcgggctgaatatgccgcttttccagttcctgaaggatatattgtccttgccgttgggtacgattttgcaaaagcaaagtttgtccagccaaccactccagcgagaactctccgatttgggcagctttcgcttctaacggatgccctttcgataaaattgcgtacatcttatcactgtgcattacctgatagctcaagccggttattcgctcaaaggacatataaaatgccagatctatttcgccgtttaacagtttctggtcaagtacggcactgggggcctctacaatgcggaactgtacctgcggaaactctttgtggaagatgggtagtaccttcggcagcgagaagctgcatcggaacggcgggataccaacataaagaacaccccggtcagaacgcagaatatccgtcatctctgcatccatctcacgcttctggcttaggatacgctccacatgggcatagtaccgctgtccggcataggtcagcttcaatcggcggctcccacgttgaaacaaaaccagtccaaggtcttcttccaacttttgcaaaaatttagaaagtgtaggttggctgacatagagctgccgcgctgcatgggtaagatttccgcattttacaatagtggaaaaatattctaactccttgaaatccatatagattcacctgtctattccgtgtgcttttattttatcatgtactatgcatataggctatagaaaaaatgaaaaattgatatttttggaatcgaaaaagttatgatatactgctacttgtgaaatatatcacaagaaaatctttctttgggacgaaaaaagcaggaggaaatcatgaaaaagaacaagatgctgtatcgcattgttgcagcagtccttgcttgtgcagtggttgcgctggcgctcgtcacgtatcagagccgcagtagcagcaatgcacctgtggcagaaggcgctgtgactgcaactggttcggcgaagggcatggaaggcgatgtggtggtggaagtcacagcagatgccactactatatactccatcaccgtgaaggagcagaatgaaacacagggcattggctctgtggtctgtgagcagctgccggataccatggtggctgcaaacagctacaatgtggatggcattgccggtgcaacggtcaccagcgatgcgctgaaggaagccgtgaaagccgctctgaccagtgccgggctggatgcatctgcttttgcagttgcacagacgagcgatgccgcagtggaaaaaactgccgagagtctggattgtgatgtggtcattgttggtgcaggcggtgccggtttgactgctgctgcacaggccgctgaaaatggagccaaggtcattgttgttgaaaagatgcccattgtgggcggcaacagcctgaaagcaacgggcggcatgaacgctgcggacaccaaatatcaggaagcactgggcattacggacagtggtgtggacgaatttatcgaggataccatgaatggcggccatcagatcaacgaccgcagcttggtgaccgtgatggcagaagaaagttcggatgcagtcgattggctggatgctatcggtgctccgctgcccaaagtcgctgcaacgggcggcactacccacaaatatctgcatgagccggaagatggaagcgcagtcggcagctatctggttgaaaagctgaatgcacaggcagaaaagctgggtgtgcagatcatgctgaacaccgaagcgaccgagatcctgacggaaaatggtgctgcggttggcatcaaggcagaaagcaaggaacataattataccatccatgcaaagagcgtgatccttgcgaccggtggttttggcgcgaactttgatttgatggccagcttcaatccggcactggccaatgctgtgaccaccaatcacgccggtgctacgggtgatggtatcctgatggcagaagccattggcgctgacacggtggacatggatcagatccagctgcatccgaccgtttatcaggaaaccggcctgctggtttcggagagtgtgcgcagcatgggcggtattctggtcaatgctgaaggcaagcgtttctgcaacgatctggctacccgtgatgctgtttccaatgcggaattggagcagccgggtgcatacgcctatattatttttgaccagcgtattgtggacgatctgaagtcctgccagaagtatatcaaaaatggcctgaccgtttctgccgacaactacgaggatctggcaaaagcaatgggactggaaggcgatgccatccagaactttgtggatacgatggatacttggaacgcagcagtggcagcaggcgaggacaaggagtttggccgcagcaacggtatggacgctgacctgtctactgcaccctattacgcgatcaaaatcgcaccgggcatccatcataccatgggtggcctgaagatcaacacagacgcagaggttcttgatacgcagggaaatgtcattcccggtctgtatgccgctggcgaaactaccggcggtgtgcatggcggcaaccgcattggcggcaatgccgtgtgcgactttgttgtgtttggccggatcgcaggtaacaacgcttcggcttacgcagcgaactaagccatttatataaaacaaaaaacagggtgcgccctgtggacgcaccctgccaaaagccacagacaacagcgatatgtacagcagggagttccccaccggagggaacttcctgtttttcgttgtttgcatgatgggcctgttccgcctgccataggcaagctcgcgtttgcgcagcgcagcggagcaatgaaagccccagtggggcttttaagcgaccgaacggtcttgcgttagcaagatggaggggcctccgccccgacaagtgaccgctgaccttcctcgctgttccagcaggcaaggatggccgggtagaacgcccgtgccagacggtcgatgacatcatcggggtaaggggaaatgtttgtggactttttctttttgttcaaacgcacgctcctttgatcgtcccaccgtggcaaagccgggcaagaaaatcaaagttccattttttatcaggcgcaagggcgcggatgctttctgccctgctcttgcggctggtggctcgttgatggcttacaagtgcctgtcgttatgcgatttctttatcgttcagcatttcttcaaactgtgccatatacgctttgtgctgcttgaggatttttagcgtttcagttttggcgtaggaatcatctggtagcttaggcaagtatctcatcaaaaaatcaaagtcctgctgaacccgccggacagcgacttccagcgcagagtagttgattccagagtagtgtgagtagctcgactgcggagcgggacggtcttccgggtgcagaatctcgtgcacgatctgcttacggttcggaaaatcagctctggcgaggcggtgcatatcggcatcacggactttgaattgcccggacaggatcttttcttttgtaccgggcatcatctgctccatgatctctacgccccgcatgaacttttcagaacgggcaacgtaggattcgctgacattgttccgctctgcaagctgcttacgaacgcttgcttctgtggcagtgggaggaattgtgtcaaattgacacaattcctccggggcggttttcttggcagcagccgtgtgctggttgttgccgtttccaccgggcttccgatgcgccacactgtactgttttccaatgaggaacttcttctgctccggcgtgagattacgccgccccagctgattcttgcagatccaagcaagggcttcttcacgatttgcaaagcggagcggcatggtagaaaagcagatttcggggtgtttctgaagaatcgcataacggttgtgaccatcaacaagggtgttgttccaaacaatcaaaggagagagcagcttgccctctttgaggatattttcttcaagctgatggaattcatcatcggtcagagggggaatctgggactggaactccgggtcgattttcagattgatcatacgcacactcctttatctctcctgttgcgccggttcttcctcccggaaaaatagcgcaacattttgctttgcggttttcagtttgagcagttcttctttggcttccttgtactgctcgtagaattttgctttttcggatgccagctgcgcatactcggcttccagctttttcgggctgggcagcttggtgatattgtttgccttgaaataggctgctgccgcccggtgtgctgtcagctctgcacggtgctgctcctcaaaggctacgggtcgcttggcagtattgaactgctgtacgatacccttggtgctggtataggctgcgacatgatagcgcaactctttgttgaatttcatgcgaccttcgaggtctttcaccaccgccagcgagtcgtgatacttggtttccagttcggcgatgcgctggttcagggcgtcctcgtcggtcaagcccttttcctgcagaagcttcacggtctgtgccataactttgagattgtgtttcgtgagccaacgcttatagccgatgcctttgccctcggtcatcctcgactggatgtcgatcagtttcccgatggtatcctgcttggactgtaccttgggtttgcgttcggcgtttgcctgcaatgtggcaagcactgccgtcttatcgaacttgtccccgagatgtttcgcgcggatgaacttcgttctgccagcgggcagatagctcagacacccacggctttccttgacggcaataccatactgctgcatgagcctgtcagaaaaatcttcaaaactcgttgtgcggtacaacaccgaagaaatctgtttccgcaaagtgtccttcacggtttcaaacttcttctgctggggcggctgtccagctgcggtgagggctgcgttctcacggtcaagtttcaactgaccacgcctacgcgcccaatactcagcttcgctcacgcgctttttcgagctgagcaggtcgatctggtacagcttggcatcctgacacatttccatgactgcgacacgcaaatgccgcatggtcatggctgtgctggaatgcttcatgccctcacgccagtcacggggcttctgcatatagggcttgcgctccacttctcgtgtccggacgctgccgatcacgatgtggacatggatgttacccgaatggttgtgcccgtccgggtgggtgcagacgatagcaggatgacctggaaagttctctttgcagaagttcaggccgagggcctgtgccttttccatcgtcagtccattttcgactgcatcccgtgggtcgaagctgatgatatactggtggctcttgatatcatccgggttgttgttcttgtcgtacttccgatttgccagcagacaggctgttgcaaacgagaaatcgccgcactcaagtgtatcgaggacgtacgaatcccgcagcttcggcttgccctgttcatccaaaagttgcttcccggtgaacgcgtcgtgctggtaaacgaggtacgtttcgatggcggtgtagtccgagttcttagagctgatatgcttgagcgttgccatacagttcacccagaactttctcggcgtgcagccgaaatgcggtcaggtctgcaagttcgtcaaggattttcgcccggatctgctcggtgtctgcaccgccggaattgaagtgccttgcaagctggttgagattactgcccaccttgctgcactgggcaagcagggtggaaacagcggtcagggtttcttcgccgccgcctgcaacgatgaccgttttctcgatcttgacgttgtggatggcgcggcggatgaaagtggagagggagagattcaggagtttgcaagtgagttccagtgacgctttttcctccgctgtcacacggaacttgatgacgtgcgttttgttgttcggcgtgtcgtggtgctgggaattgctaggaatcggttgaacattcgttttggtcattgtacctcctgtctgttcgataactcctcggtgaagttatgtaaagcacgacacgccgttccattcgtgccgtaaggcacgaatgatgagcagggtttggggcaggcacgccccaacaagatcacttcggaaatgcagacgcattgtagaagtgaagtcccggatggacaggaaattttcaagaattgaaaatttgtggccacgggacggttcttgccctctaccgctgcgctcaaaatcgtttccgggtaattgtttccgaattgttaaggcgtaaaaataagtagaggttgtgctgctcatgtatgtgggtcaccgtttgctccgaacgaagttcctgcccctgttttgcagcggcgttgacgaaaagtcggtatcacgtccggtcggcttatgaaattttcaaggtacgtttcccataaagaaaaataccgcccaagcagcgcagcgacggattttgtcggggtgaatcggcggcaaaatgaatcgagtgtgttgcggggcggtaaatcttcgcaggaaataaaaccgcacagaatcgtttctttacagaaatcgctgtggatttgttgggaatgataacataagtattgatgtgtgtcaacacttcaggataatgaatacatcagatgaatgaaacacacaaagtacaagcaaaagcaaagcaatgttttaggagaatgttttaattttcgcagttcaggcggacttggacggtaaacacaccgtctttctttttcgtatagaagtcaccatggttctcctgaacgatacgatttatattttttagtccgtaaccgtgatactctccgatgcggattccgcgagaagtatcactgtatgggttttccagccgatagaagaggcttcgatactgcttgcgcagctgtagatgaatgattctctgttccgctggcaggtcgcaacaggcttcgatggcattgtcaaatgtgtttccgataatgatgctcaaagacaacgatgagatcgtcaggacttcaggaatcgtcacatccagtttgacgttgatgttattcctttccgcaattcgtaagtaataattcaaaagagcatcaacaacaggatttccgaccgcagaaatatttgtggaacgctcgaaaacatccgtggcagcctgcgcaatcttgtgaagttcttcggtatcaccgtgttctgcaactgcctgcatcgccaggatgtatttcttcacatcatgccgcagagaacggacttcttcctggcgttctttgagctgctggtagtattccatttgaagattgtactgctgttcgttgaacttaactttgaatttttccagttcattttcccggagagcttccacatagaacacgatcaggatgtttataaggagaagcaccgccataagaccgaccatataatccgggaaatactcatccgcagcatgatactgtgccacataacagacagcaatacttgcgatttgaatcgcaatgatcggcagcagccataggatacgcagagcatttccttttcggctgaaaaaatgtgagatcaggtctacgagtggaatttgaatcaggtttgaaaaaacaacatagaccaaccgtgctgccccagcctgcattagaatgtcggtatccgggatacgcagcccaatcagaagcattgcaagcacttccaccaaagcaatcagtgtgaagaaagctccgcttgcaaaaaccgcctgccacggtcgaacctcatagaacagcaatgcaaggaaaaatccgccaactaaaagatagatcgtgcgctgcgtcacccaatccgggaataaactcaaagcacactgcccagcaatcaagagtgcaacataggcatagaaccaccttgagacgggctcctttttgggaaacagccgaccgataaaaagcagcaacagggcaatgttggcaaagctccctgcaaactcaacgaaataataaagcatcatcttcccaaataagcgttgaagatctgattgaactcctgacgcttcctcctgctgatcggcagctgatgtccgctggaaagaaaaacagcggttcccgtagcgtaaacaatgtgttccatgttgacgagataacttttgtgtggtgacacaaagcaccgtttgggaagctgctccaaggcttcaggaatgctcattcgcaatgtaaggtcttgctccttgcagtgaatcagaactttatgtccgtggctttccagaaagtaaatgtccgatgtttccaaggacatggtaacaccatcgtattcgatcgtgaaatgtttggagttcagttcctgaaggacggcatccattgccgcagcgaacagcgtctgatccaaaggtttgacaaggtagcggaatgcaatgccatatccctgcacagcgtactcatgccgcttcgtgacaaataccaccaaaggatgcttctccatctgaatcaaagactgcgccagctgaaaaccgttggatggcatctcgatatcgagaagaagcagatcaaaggatttcttctgcatttgcaattcgctcagaagttcgtttccatccatgtaagtttcaatgtcaaagcagccttgcacatcgtactgctggacgctttgaacaatgccatcaaggtctgatttctcatcatcgcagactgcaacgtggtacttcagcatttcgacaacctccacaaaataatgtcctgctactattatagactgtgcaaaggctccttacaagtagcctgacctaccacttttgtcaccagaacgaccagttttgccaaacctcttgattttgctgaaatttatgatacagtgaagcaaaaatcagaagataaggtggcgcaactgcaatgtgggaacgcacgctgtctcaaaaatcagtccgtcttttctgcgagcaaaaagtgatagatgaagcaaaggcggatgcgtatgtctatgggtacgagttgctcatatcatctgttgtgagcgttctgcttgttgttttaatcgctgttgtgtgtggtgatgtgcggtacgcactttcatttttgattgggtttatcccacagcgaatctacattggcggataccatgcaacatcgcacaccagatgctatttggcattctccggactggcacttatctgcattttgctaagtaaggcaatcgcagcaaatcaccttttccgtatcctgacaacagtagctcttttgggcatctctatctttctctcacctatcgaagcaaagaataagcctttaagtgaaaagaagcggtcaagttacaagatggtcgcatctgttctttcgtcaatagatttcctgcttgccatttttaatgtgcttccgtatacacgtcatgtagtttgctactatctctccaaatgggtattgattgtattctcaacaattcctttggttcaacaaaaatttaatgccaacttttgtagatagggaggtgataacatgaaaaaaaacaaatgggtgctgcttcttatcgcttttgttgcatttttggtattggtttattttattggtgcttgccttaatgcaacggcagaggcattgacaattatttcgctctgcatcggcatactggtcatttatttagtcgtaaaagcaatcaaatcaaaataaggaaaggaaaatgtgatcatgagtacaagaaaattcatcaaaaaacttacggcgagtctgctttttattgcggttgtaatgtcgtttggcgttcagtctgccttcgctgaatcgaattcaccgaaagctaccgttaagaacaacgttgttacttttagcaatctcgatcaactgaaggcaaacgagaagctcacaattgcggtagttgacagtaatggtgatccagcaactattactatcgagtcagtggacaattcaatttctcgtgtagcgaaatcgtcgaattcttggaaggtttcgtataagggagtggtgattcatgcatatttttatatgacagtgacgaataacaaagtcacaaatgcatgggactattcgattacaactttgggttccacatatagtgatgcaagtttgacgtataactccagttcggcaaaactcacctttaccagtaacgcttataatggtattgcttctcatacttgctggctgaagggaactcctcgcggaacaaacaatgaagtcgatgtaacgtattctatgtaatgtggaggacaatatgaaacagaattcacaaaaactgatttttttcctgagtaaaattacatgtgcttttgcaatggcgattgcagtcttaagtgtgaatagcacctgctgctttacagcgtatcagccggatgtccctgaatcgcttgatcgcaactaaactcatatgatagacattacccattgctatcatgatattttgtattcgtatgattccggtggacaccttatggatactacaaaatcgtaccatcaagctgtgggaggctaagaatgaaaaaaggcaaaagcaacttttttcttattgctccttttgctctttggggctgcatttcagtatggactagtaatcttgtccgattgacagataaaagcgcagtaccttatgcttgggcttctttgtttttctcatatggaatcgtagcagtgcattatatccaagtggcagtatcctccaaaggctgtaacaatgccgaaaacgaaaaaattgcatgggttcagcttgggctttcaactttgttcttgatagtagctgttgttctagctattcaatgaaggaaagcaaagtaatcacccaaagcagtgtaaggtcacaatattttctattccagcagtattctagtagtttcagcatttgtatggttcacatttatttgccgaggagtatacacctgaaggggaaaatttaatgaaggtgattccaatggagctttagtgtattgagtgaagaaaaaaataaattaggaggcagtatactataactaacaaaatcaaacggctgatttccattctattggtcacggttttatttctcctgaccattcagccagcatttgcaactggaaataagagaaagatcgatgattattcgatagaagaacttctcaatctttctgtgcaagaacaagagaatctcggattttatgttttggccgaggttccaatgcgcattcctgtttctaatacagacggctcaagagttgtatcgtatattgatggaacatggagagttctttatacaaaggccaatggattgggcttttatatgagtggaactaccgtcggtattggcccggatttaataaaaaatgtttcaggaacggattactacacgagctattccgataacatcgaacgaagctgcccattttcaacgacagcactagttccagaacaaagtatatataatacaacctatacatatgacttctatgatgttggaacttatcttgattgcagcgttgggtgttattttggagtggttggctcaagcaaaccaatctattggagtgcaactacacaagttaccatcccgaaattatgattttgaccagctatggatgaaattgtttttgaacccagtgatgtcaatatgttagcagctttaggcatcgtcgaaagtgtaaagttgtttccgtttatgttatcaatgggagaacttcaatatgcttgcgattcagaatatcgttgcaaacaattcgtgaattgcctttcagaatattatcctgacagccaaattgaagctagacaactgtggtcgaaatatcatggtacagcgaatgcggttcaatgtgatatgataaatcataagccactgcgtgtttgggtcaggagttctgccgattgttggtgcggcatttattatatttgttactatgcagcaaagtatggtacaaatagaattttgcttgcatccagagaaggtctgaaagaatttatggaagggaaaaccgataagatctcacaaaagtatttgacggaagaaactattactgagtatgccaaaagatggggaaagctattaaacgaaaacacctccatgcgtatttggcatgcgaacgatgttaaaagcgttaacatagattatttcgaccagagaattattagtttagtatcgagaattcctatttcggttggtgaacttaccgcagacgtattaaaagcgatttctgctccggtaagtgactggtatgtcatgaaacgcatagaagcacttttgaaaaagggtgttcttcaagtcgttattccaaacaaaatcttttataataccatcgtccagctaaacgaagaataaaggaatccgagcaagtcggcccaacagtcacctcatttcaacgagaggggtggctgttgggtcaattgttcaaaaagaaaaactgaagataataaaaagtcttgatttctccatcaaaacatggtatatacattatacgaaacagtgctttgaaagaacgctccaccgttcaatgacgtgtaaagagaggtgcttgccatgaccgctgtgatctacgcccgctattccagtgataaccagcgcgaagaatccatcgaaggccagattcgtgaatgcacggcctatgccgaaaagaatgacatcactatcgtcaagcactacattgaccgcgccatctctgccaagacggataatcgccctcaattccaacagatgataaaggacagcgacaagaagctgtttgatattgttctggtctggaaacttgaccgctttgcccggaatcgctacgacagtgcccggtataagacccagctgaagaagaacggtgtcaagctcatgtcggctacggagatcatctccgaggggccagagggtatcattctggaatcggttctggagggctatgcagaatactactctgccgaccttgccgaaaaggttgtccgtggacagacagagaacatcctgaaaggccgctgcaacggtggtcgtggaacgtttggatatacgctggattccgagcggaaatttcacatcgacccgcttgcctcccctttcgtgctggaatcgttcacgaagtatcgggatggcctcacgatgaaagagattcgggactggctgaatgaaaacggcatcaagaacccggtcggaggcgaatttacttacaacagcgtggagtacatgctcaaaaaccggcgttatatcggagaactgaaattccgggatgtggtcgtgccggatgcgattccgcccatcgtgccgctggaactgttcgatgatgtgcaggaaaagattgccaaaaacaagaaagcccctgcccgaagaaaggcagaggacgattacctgctgacaaccaagctgcactgtggttgctgcggtgcgctgatgtttggcgaaagcggcacaagccggacgggagaagtccaccgctactataaatgtgccacggccaaaaagaagaagggctgcaagaagaaaactgtccgcaaacagtggctggaagatctggtggtgaaccagaccatgcagcttgtccgggacgatgccgccatggaatccattatcgccaaggtcatggagctgcaagaccgagagaacaccaaccttcctctctatgagaaacagctccgggatgcagaatcgggtatccagaatatgctcaacgcaattcaagccggaatcctcaccagttccaccaaggaacggttggaacagctcgaagaaaccaagcgtgagcttgaagcccgcattgcggaagaaaagctggcaaagccaaaaatcaaagaggaatttatccgtttctggctgatgcgcttccgtaaactggacatgagcctgaaagaccagaggcaagcgttggtggatacgttcatcaattcgatttatctgtacgatgataaggttttgataacctttaactataaagaaggtacacagaccatcacgtttgaggaagcggcccaagccgcatcaaaggaaaatggttcggatttggattgctttactgcaccaagaaaaaccagaacacattggtgttctggtttttctttttgtctgcacgatggaagggctcgaacagggcggcggcgcacagcgccgcaagcaaagccacagtgcggctttgcttagcccgcgggtcccaacggctaggaatgtctaacgtggaagctgtgaaatcgaaagatttcatggcttttttgttttgtaagccatggctgcacggtctggatgcttgcaagtggattttgcattgtgctataatttttctgctaaaatctatcgcgcaggcagcatctgccgatcgtatagggaggtctgtttcatgaataccacattgcggcgggacgccgatgcaattgtccgttccagcattcaggcggtgcttccagacgaagctgtgcgccgtgcgctggaagcctttcagccaaagggcggcagagtgctgctggtggcggcgggcaaagcggcatggcagatggcgcacgccgccgtgcaggcactggggcgcgtggacggcggcgtggtggtgacaaagtacggccatgtgaagggcgggatccccggtgtggattgctgcgaggctgggcatccggtgccggatgccaacagctttgcggccaccgaaaaagctttagcgctggtacgggggctgaccgcaaaggacacggtgctgtttctgctttccggcggcggcagcgctctgtttgaaaaacctctcgtctccggcgcagagctgcaggacatcacaaatcagctgcttgcctgcggagccgacattgtagagatgaacaccatccgcaaacggctgtccgcagtcaagggcgggcggttcgcgcagcactgcgctcccgcaagggtgttcagcatcgtgctcagcgatattctgggcgacccgctggatatgatcgccagcggcccggcagcgccggactcctccacctgcgcacaggcgcttgccattgcggaaaaatatcggctgaacctgtctaagcaggcaaggacgctgctggcgcaggaaacgccgaaagcccttgacaacgtgaccacccggatcaccggcagtgtgcgggaactgtgtactgccgccgccgatgcctgccggaagctggggtatgagccggtcatccttaccgaccggctctgctgcgaagcccgggaggcgggcagctttcttggctccattgtccgcacccatgcgggacagggcaaaaggctggcttttatcgcaggcggggaaacggtggtgcacctgaccggcaaagggctgggcgggcgaaatcaggagcttgcgcttgccgctgcccctgcccttgcggggctggaacactgctgtgtgttctcggtgggcagtgacggcaccgacggccctaccgatgccgcaggcggctatgtggacggcgacaccgccgccgcactggctgcagcgggctggaatgtttttgacgctttgcaaaacaacgatgcctaccacgccttgcaggcagtggaagggctgatcctcacaggggccaccggcaccaatgtcaacgatgttgccgtggcactggtctgacgcagaaaaagccgctccgggcacacccggagcggcttttttaaggaggtaacgaggtaaatgaataaggatctcccaacgcttatcccggggtgcaggccccggacagcgctcaggcaaagaaggaaataacaagtgctaccaggaagcccacgccgccgaccagcgtttccatgatggtccaggtcttgagggtggtcttttcgtccatgcccacaaggctcttcaccagccagaagccggagtcgttgaagtgggagcagacggtggagccgcctgcaatggcagcggtgacacaggcgagatacagcgggctcagctcgctgaggccgggcatggcggagatgatgcctgctgccatggtcatagccacggtagcggaacccaccgagatacgcaccagagcagccacgatgaaggccaccagcaccagcggcaggctggcgtttgccacggcgttgccgatgacatcgcccaagccggagttctgcagcatatagcgcagcacgccgccgcaggcagtgaccagcaggatcatgccggtgggctccagagacttggtcatgatcttttccagctgggcgttggtgtagccgtgacgggtgcccagcaggtacatagcagcgatggtagccagcagcagagccatgaagggctcgccgaggaaggccagaacgggctggatgcctgccagtgcgggcaccacctttgccacggagtttgcgatgatgagcagcagggggatcatgatgatgcccacgatggtgccaaacttgggcagcttgctctcgtcaatgtctgcctgctgtgcaacgtgctcggggacttcgatcatgtactttttgccgcagatgctgccccagatgggaccggcggcgatcatggcaaagatgccgcagaagatgccgatgaggatgacccagccaaggtcaacgcccagcatggtagccaccagcacgggacccggcgtgggcgggatgtaggcgtggccgaccgccagaccggccagcagggggatgacgtagtacagcacggagcgcttggtgcgctttgccagagagaaggccagcgggatgaggatgatcagaccggcgtcaaagaacaccggcatggccacgaccagacccgtgatgcccagtgcccatgcggccttttcgtcaccgaacttccgcaccatggtcacagccagcgtctgtgcgccgccggattcttccagaatggcgccgaacatggagcccagacccaccagaagggcgatgcccttcaaggtgttgccgatgccctcgttcaccgagccgatgatgtcggacaggggcataccggccatcaggccgatacccaccgcaccgatcaagatggagatcatggcgtgtactttaaacttgatgatgagaatgagcaataggatcagacctgccacggcagcaaataccagccgtgccgcatcgggcgttgcaactgctgtcatagaaaattcctccgtttcatgattttttggttgcacttatccaagccgtccggcaaaacccgccaggcggtttactgcttgttgtttacgagggacgttttactccatgtatgcacccttcatggggctgacggcgtgctgagagtagagcttcagcagacccttggtgtacttgggagccttgggcttccagttggcgcggcgctcggcaaggatggcgtccatctcttcgggggtcttgggctcgcccttcacgcctacgatggccagcttgcggttgtgtacgtcgatctggatcaggtcgtcgggctccaccagtgcgatggggccgcccaccgcagcttccgggctgacatgaccgatgaccgggccgcggcttgcgccggagaagcggccgtcggtgatcagcgctacgctggaagccagcttcgggtcggcgcagatggcttcgccggtgtagaacatctcgggcataccgctgccgcgggggccctcgtaccggataaagatggcgtcgccgggcttcacctcgccgtgcagcacagcggagatgcattcctcctcgctgtcgtagggcttggcgtgcagggtggcttcaaacatattcttggggcaggcggtgtgcttgatgacgcagccttccggggcaaggttgcccttcaggatggcgatgctgccgtcggtgcccttggcgttatcaaagctgtggatgatgtcctcgcggctgaccgggcgggcaaagccggcggtcttttctgccagaatggcatcgcagtgctggtagaagccgttcttcttcagctcttccagattctcgcccagcgtcttgccggtgacggtcatcacgtccagatgcagcatggacttgatctcctccatcacgcggggcacgccgcctgcgtagtagaagtactgtgcgggccagtcgccggagggacggatgttcagcaggtagtgggctccccggtgcatccggtcaaaggtgtcggcgtcgatctcaatgccgaactcgtgggcgatggcgggcaggtgcatggtggcgttggtggagccggaaatggcggcgtgcaccatgatagcgttctcaaagctcttcttggtcacgatgtccttggcggtgatgcctttcttgaccagctccatcagctgcttgccggcatcgtaggccgcctgcttcagctccggggcggtggcgggcatcagggcggtgcccggcagcatcagacccagtgcttctgccatgatctgcatggtggaggcggtgcccataaaggagcaggcaccgcagctggggcaggcgttgtgcttgtagtagtccagctggctgttggggatgacgccggtcttttcccatgcgtcaaacttgccgatctgctccagcgtcagcagctcgttgatggcgcaggcggggtcgttgaccacatattctttcggcagggtgtgggcttccatgacgccgccggtcaccacgatggcgctcatgtccttcaggcggccgatgctcatcagcatggcgggcacggacttgtcgcagctggcgatgaacacaccgccgtcgtagacgctggcgtttgcctgtgcttccaccagattcacgatggcgtcacgatggggcagagagtagttgatgccgtcatgaccctgtgcgatgccgtcgcacatatcagtggcaaaatagcgggcagccttgccgccgttgtcgttgaccgcctgcacggcttccttgacgaactgatccagatgggcgctgccggggtggctgtcgccgaaggtgctttccaccatgatctggggcttggaaagatcctcgaccttccagcccatacccattttcagcgggtcattttcgggtgccagtgtgcggacttcctgtgaacgcaactccatattcattacctccaaatactgcttgctttcgtccttttttctgtaggaccttttgtgatttaattgtaaaaccgcagacgtctctttgcaagttgtcacgggtatgtcctactttttgtgcaaaaactctgggatacatcatgcactctgcccaaaaccgggcgaattttgcccaaaatcagccgtcaaagcggcttttgagaaaaaaggcagaaaaaagtcgtctgatgactttgaaaaaagagggcgcagcacatagtcagcgtcctcgccctctccgtctgctcccgttggtcgcatccacctctcccaaagggagaggctttggcagtccacgcaaggtttccggttttgccaagggctctccctttgggagagctggcgcgtaagcgcctgagagggcgagcccgctccccacaaaaaagattctttctctaataataacgcaaaaaagctccccctttcgggggagctggcatcgcgcagcgatgacggagagggtttaatcctctttcttatccatgatatatgccgccatgccgatggtgccatcatccgggtcctcgccatcgtagacctttttgatatagctgcggttgaagttcaggtgcatcaccatggcagcttttgcgccgagggggtcgtggttggcaatggcttcggtgatcatgcggtgggtcatgatggtctcatcgatcagctttttgtgggtgacgttcacgaacatcatcaccgccgtgtcgatgaccgggatcagctgccccaccaccagattcttgctgctctcggcgatgcaggtgtggaaggcgatgtcgtcctcgatgtagcggtcgccctcgtggatcttggcttctacccgctcgcagagccgccgcagccgctcgatgtcctccggggtggcgttctgcgccgccatctccgcaatgcccggctccagcagcagacggacgttcaccagatcaaaggccagtacgtttttatcctgcacgctgcgcaggttcagcggatcggaaagccccttcaccgtggtcaccacataggtgccggagccttgccgcacctccacgatgcccttgctggacagcagcttcaccgcttcgcggatggtgctgcgtcctacccggaacttttcgcccagtgcaaactcgttgggcagctttgcgcccggctccagcgcttcgtccagaatataatggtagatctgatcctccacctgctcggccagcagcttgtttttcaggtgtgaaaattcgctcatagcagtacccctttgcgcctgcggcttttttctgaagtatacggtgcggcgcgcgttttgtcaacaaacggcgcacacacaaatcatgtctggtctggctcgccgttttccagcttgcccagataccgccacagggtggtgcggctgatgcccagctgccgggcggcggcggcgcggttgccgccgtgggcggctaccgtctgctgcaccacctcgccgatgatgctttccagcgtgcgggaggtgtcggtgctgatcaccgccgccgggtgcgccgccggggcgctgcgcaggctgcgctccttggagagcaggtctgccacgctgctgctgcggatgtaggggccgttcgtcagggtggcaagggagcgcagaaggtttttgaactgggtgtagttgttcggccacgggtactgccgcagcatctcgatggcgcggggctcaaaaccggagatctgcttgcccagctccagattcaggctgttcaggtacaaactggaaagggacgggatctcatccgaccggctgcgcagcgggggcagttccagcgtcagcgcgcccaaccgctcgataaagcggcgggtgaccggggagaccggctcctccggccgcaccgagcgggagaacagcagccgcacccggcgggcaaggccggtctcctcgatagcagccagcagctcggcgctccactgctccgggatggcttcaaagttctggaagtagaccgtgttgccgttggcgttcaggggcgagttatagtggttgagcagaaaatcccatgatttatcgttcatcatggcgcagtttgccaccacgagggggcggttcaccagtgcgctgtgcaggtagaggtagcgggcgatctgctccttgccggtgcccggctcgccgcagatgaacaggggctgacgcacggcagcaagggcgttgatctcggcatcctgcgtgcccatggcaccgctcaggctgtaaaagctgttggagaaaagatactcgcactcgccttggttcagcgaccgcagccccgggcggctggaatgcagcgggatgcgggagggcacgcagtagaacaggtaccgctgcacgttgttcatcagcagcacctgtgctgtgatgctgtacagctggctgcgctcggtgtaatagaactttaagctgcccgtggtggggatctcccgcagatgggtctgtaaacagcggtgcagctccggggagatgtccttcatattattatagaacaggctgccgtccggctccatcaccacgaccctgccgccctgctcctgcgtgatgctgcgcaaaaacaggttctcctgccgcagctggccgaaccatgtgctgatgttcaccgcctgatcgatggcgctgtgcaggctttcgatgccggaggtgatcaggaaggcgtcaaagcccatctcccgggcaatggtgtgggtgaccatatcacagaccaccatccggtagccgccctgcttgagccgctccaaggtgtggcgcacctcctcggcgctgcggacggtgaggatgtccagatcaaagttcagcaggctgcaaagggtgtgggcgggctcggtgatgctgggaaagcccacgatggcgtacaggctggtgtagttctctgccagtttcatggtgcgcagcacatcgtacaccgaaatatggatatccaccaccggcaggtcggtcacctgccggatcagggtggcggtgccgccgcgggagatgatgcagtcgtagctgttgggcgtcatgctctgcacgatggcctgtccctcttccagatcgccggtgtacacctccagctcaacgttggggtaggcctgcgccgcctgctccatggcggtgcgcattccgtcgtagggggcaatgcccagaatgcgggtgtgagtttcgaccataaaacgtccctccatgtttctctttgaaactattatactcggtgtagttcaaaaagaaaacagaaagtggtttcaaaatagaacgtttttacacttgaaacggaaagaaaattgaaaacgtgctaaaatgaaacgcttttgccccttgcgcggggtgcaatcccctgccggatacggcataatgaaagcacaaaaacaagtgagggggcacgaacgaatgcttcgcctgctgatgattgcagatgattttactggtgcgctggataccggcgtacagcttgcggcacacggcatccccacgcaggtcgtggtggggcaggcagacctttccgcgtgcagcagcaccgtgctggtggtggataccgaaacgcggcatctgcccgccgcaaaggctgccaaggctgttgaagagctgacccgcagcgcggtggaaaacggcgtgggctgcatctataaaaagacggattccgccctgcgcggcaacatcggcgcagagcttgccgccctgctcaaggcaagcggcgcacgcaatttaccctttctgccggccttcccgcagatcggacgcaccaccgaaaagggcgtccattacatcaaaggcgtgccggtgaacgaaagccccttcggcatcgaccccttcgagccggtgcgctgcgccgaggtgacaaagctgatccatttgcagaccgatgtccccgcacagagcctgcagcccggcgagacggcagcggacaagaccggcattctggtgtatgacgccgccaccgccgcagaccttgaagccgccggacagcagctgttccagaatggaacgcccccggtgctggcaggctgcgcaggctttgccgcctttctgccggagctgctggggctttcggacggcagcgtggtcgagaccccgcagctggacccccggctgctggtgctctgcggcagcgtgaaccccatcaccctgcggcagatggacaccgccgaaaaggcaggctttacccgcctgcggctgaccccccggcagaagctggagcccggctactgggcaagcgccgacggcaaggctgcgctggcagaaatcgaacagatgctggcagcaaacccccgctgcatcatcgagaccaacgatgccgggggcaaccagctcaccgccgactacgccgccgcccggggcattgacttggacggcctgcgggtgggtatttccggcagcgtcgggcagatgttcggggcgctgtttggcagcgagcatctgggcaccctgctgctcaccggcggcgacaccctgctgcagtgcatgaacagcgtgggcgcacgggagctggagccggtatgcgagctggaaagcggcatcgtgctggcgcggttcacctatcagggacgcacccgctacgtgatcaccaagtccggcggctttgggcaggaggatctgctggtggagctggcagaccgcattgcaaagcattgagaatggaagcagacagcccttgcggctggaacggaagataaatgtaacagaaggagaacgaccatgacctatgcaaaactgcccggcctgacttgggacggcactgtgtacgagaacgaggagatgggcacgctggaagccctgctgcccaccggcggctggcccaccgcccacgcacccgctatggtggagctgcccaatggcgacctgctctgctgctggttcgccggtacttatgagggcagcgcagacgtgcacatcatctgctcggtgctgccgcatgacggcaccaaatggctggagccggtggatatctccggcgaccccacccgcagcgagcagaacccctcgctgttctacggcccggacaacgccgtgtgggcgatgtacaccgcccagctggaccgcgtagagggcaaggacaatatgcagttcaccgccgtggtgcgctgccagaagagcaccgacggcggcagaacatggggcgactacaccactgtgttcccggaggagggcactttctgccgccagcccattcaggtgctgtccaacggccgctggatctttgccaactggctgtgcaccgactctgccgagggtctgtccggcgaccccaccgccttccgcatctcggacgacgagggtaaaacttggcgcatggtcatgatgcccggcagcaacggccacgtccacgccaatgtcatcgagctggagccggggcatctggtggcgttcatgcgcaaccgcgaagcctaccgcatccaccgcagcgagtcctttgactggggcgaaacttggacggtgcccgcacccaccccgctgcccaacaacaactccagcatcagcgcggtcaagctgcagagcggccgcatcgccattgcctataaccccacctgcacccccaaccccgtgcccggcaaggctgcatggcccggcctgcgctgcccggtggcggtggcgctctcggaggacggcggcctgaccttccccatcatccgctggatggagcgcggcgagggctacatgggcgatgagaacaagaccaacaacaagcagtacgagtacccctacctgatgcagggacgggacgggatgctgcatctggcctacgctgcccgcacccggcagggcatcaagtacgtccgcttctcggagcaggatgtgctgggcgcaaagcgggaaaccgtgggtttgtataaccccaccgcagcccagagccgctgaaaaagcttttcggaattttcatcctttatttatagagcaaagcatcattcaggaggttgatcagtatgctgacccagtacaatcttaaaatgccgcacgcagtttacggcggcgagaacgccatggacaatatcaccgccatcatcaaggcgcgcggcgcaaaaaaggtagctatgttcaccgataagggcattgagggcgctggcctgtttgccctgccggaagaagctgtcaaagcctccggcgcagagtattatgtgctggacgagctgcccccggagcccagctacatggctgtgcagaagctggtggacgagttcaaggtctccggtgcagacctgatcgtggcctgcggcggcggctccgtgatggacgctgccaagctggcaagcgtgctggtgactgacgcctacggcgtgaaggaattgctggataaccccggcatggcacagaagtgcgtgcccatcgtgctgatccccaccaccgccggtaccggcgccgaggtcacccccaatgccatcgtggctgtgcctgagaaggaactgaaggtgggcatcgtcaacgagaacatgatcgcggactacgtcattctggacgcccgcatgatcaagaacctgccccgcaagatcgcagccgctaccggcgtggatgcgctggcacactgcatcgagtgctttaccagcaacaaggccaaccccttcagcgatctgtacgcactggaaggccttgacctgatcctgaacaacatcgaaaaagcctgcgatgaccccgaagccatggcagagaagaaccggatgcagatcgcagcctactacggcggtctggctatcaccgcttccggcaccaccgccgtgcacgcactgagctacccgctgggcggcaagtaccacattgcacacggcgtgtccaacgccatcctgctggcaccggtcatgcgcttcaacagcgagcaccccgccgtgcgcgagcgtctggctgccgcctatgaccgctgctgccacgaggaaaagacctgcactaccgtggaggaaaagactgcatggatgatcgcccgtctggagcacatcgtcaagcatctggacatccccaccagtctcaaggagttcggcgtgcctgccgaggatctggaaggtctggtcaacgccggtatgcaggtacagcgcctgctggtgaacaatatgcgccccgttaccgccgacgacgcacgcaagctgtatcaggagatcatgtaacagaaaaggagtaaagacttatgaagaccagcgatatcaagggcatcatccctcccgtaatcacccccatgaacaatgaccccgagcagacggtcaaccatcaggctctgcgcgagcaggtggagcgcctgctggcaggcggcgtgcacggcattttccccatgggcaccaacggcgaagcctacgccctgtccttccaggagaaggaagagatccttgccactgtcattgatcaggtaaagggccgcgtaccggtctacgcaggcaccggctgcatcaccaccgccgagaccatccgcctgagcaagcgtgccgaggagctgggcgcagacgcactgtccgtcatcacccccagctttgcactggcttcccagaaggagctgtacgaccactacaccgccgtggcaaaggccgtcaacctgcccatcatcctgtacaacatccccgcccgcaccggcaataagctgctgcccgagaccgtgcaggctctgtgccgtgatgtggagaacatcgtgggcgcaaaggattccagcggcgatatcgagaacctgaaggcctacatccgcctgacccgtgagctggacaaggaagttgccattctggccggtaatgacggcgctatcctgacctgcctgaaagagggcggcgcaggcggcattgcaggccgtgccaacatctggccggagaccgttgccaagatctacgattgcttcaaggccggggatctggagggcgcacaggctgcacaggacgccattgccatcctgcagcagacctttaagtacggcaaccccaacaccatcatcaagactgccgttgccctgcagggccaccccgttggcaagtgccgcgcacccttcaactatgtgcccgaggaaggcatggaggccatcaaaaaggttctggctgagaacgaggccaagggtctgcactgaaacgcgctgaagcaaggagaaggctgctatgaataaacccattgtcggtattactatgggcgatcccgccggttccggcccggagatcaccatcaaggctctggctgacccggagcagtacagctactgccgccccatcgttgtgggcgatgtgaaggtgatggagcaggccaaaaagttcgttggccgcgaggacatcgtcatccaccgctgcgagaaggtgtcggatgccctgttcacccccggcaccatcgacgtgctgcatctggatctgatcgaggacatcagcaagttcgagatggcaaaggtcagcgtggagggcggcaacgcagccttccagtgcgtgaaaaaggtcattgagctggctatggcgggtgaggtggatgccacctgcaccaacgccctgaacaaggaagccatgaacaaggcgctggagtactaccacggcgaaaagtcggacggctacacccactttgacggccacaccgagatctacgccacctacacccacaccaaaaagtacaccatgatgctggcacatcacgacctgcgcgtggtgcacgtttccacccacgtttccctgcgggaagcctgcgaccgggtcaagaaggaccgcgtgctggaggtcatcgagatcgccaacaaggcctgcaaggatatgggcatcgagaatccccgcatcgccgtggcaggtctgaacccccactgcggtgagaacggtctgttcggccgggaggagatcgaggagatcacccccgccatcgaagccgccaaggccgagggcattaccggcgttgtgggtccctgcccgccggacagcgtgttctcgcaggccatcggcggctggtacgacatcgtggtgtgtatgtatcacgatcagggtcacatcccgctcaagaccgtgggctttgtctacgaccgcgaaaagcaggagtggaaggccgtggagggcgtcaacgtcacgctgggtctgcccatcatccgcgccagcgtggatcacggcaccgacttctaccacgccggcaagggcaacggcaacgagctgagccttgtcaacgccatcaagtatgcggtcaagatgaccggccgcgccaactaagttatcttcatcccaaccaattcttcattttcttccagagagagccgctgcaccccgtacggtgcggcggctttttctgattttccccgggtgttttttgtcgtcaaaaccgcaaaactgtatttctagcaaggactatttttgaggtgcttttgcaaaagtttacaaaaagcgccggttctgcccgcaaaatgcctgaaaacactttctctttttgagcgtgtgtgatataatgacaactgttcttgtgtaaggaacaggaaaatgtacgcgctaggcgtacagtgtaagaggagtgttacgatatgaaaaccttgaaagcggttgtagcaaaatacaaccagaccagcctgatcctgcgcatcctgatcggtctggcagccggttcggtgctggcgcttgttgcgccgggcgcaggttgggtaggcgagctgggcagcctgttcgtcggtgcactgaagggcattgccccggtgctggtgttcgtcattgtggcaagcgcgctggcacagggctcgtccaagctggaccgccgctttggcactgtgatctggctgtatatgctcaccacctttctggcggcagccattgcggcgatcaccagctttatgttcccggtcacggtggtgctggcggatgcagcacagtccgacgtgatcccgcagggcttgggcgaggtgctgagcaccctgctgaccaactttgtggcaaaccccgtcagtgccctgatgaacggcaactacatcggcattctgttctgggcttgtatgttcggcattgccatgaagaacatcggcgcagagagcaccaaggtctttctggcaaacactgccgatgccgtctcccagatcgtgcgctggatcatcaatctggcacccttcggcatcatgggtctggtgtacaccaacgtttccggcaacggtctggccatctttacccagtacggcaagctgctggcactgctggtgggcaccatgctgttcatggcgctgatcgtctccccttttatcatgttcatttacctgcgctgcaacccgtacccgctggtattccgctgcctgaaggagtccggtctgaccgctttcttcacccgcagctctgccgccaacatccctgtgaatatgtccctgtgtgaaaagctggggctggacaaggatatgtactccgtgtccatcccgctgggcgctaccatcaacatggacggcgcagccatcaccatcaccatcatgacgctggcagcagccaacacgctgggcattcaggtgtccctgcctgctgccatcgtgctgagcgccatgagcgctctgggtgcctgcggcgcttccggcgtggctggcggctccctgctgctgatccccatggcctgctcgctgttcggcatctccaacgacattgccatgcagatggtgggcgtgggctttatcatcggcgtggtgcaggattcggtggaaactgcgctgaactctgccggcgacgtggaatttgccgccaccgccgagtatcaccagtggctcaaggagggcaagcccctgccggctttcctgaagggctgataacctagcataaataaacaaagcagccgtcgcacttttggtgcggcggctgctttttgctataatattttacccaagcagtacaacggcgtagcgcacgccttcgtttaccacataggcaacgcccagcttggtcttgccggcggcggcagacttcatggtgtcggtcacgatgccgtccttcggcagaacaaagcggatgtagtcttttctggaatccagatcggtatcaatgtaaaagcccgggacaaaatcttcatccgaaccataaatgcccatacccatgctttcaaatgcagtggcatatttgtgctgcaacaggttggtcttggcaatgtcattggcgctgccaacgcggtaaagctcggtcttatttgtattggcagagcaggataccgaggtggcagagacccagttggcaatgctgtaggccttgtcgctcagctcctcgctgtaggtcatgccgagctgctggcacagcgcctttgcgctgctggcatccgaatgcttggacccgatcggcacacctgcgctgccgtcacaggcggtaaatacggccagtgccatcagactggccagcagacaggccagtaatttcttccattttttcataaaacgatgctcctttctgttctgaggtcgttgcgggtttgcgtccggtgcggcggacgcagctttttgctttcttctgcatccatgatacctttttttgacgggaaatgcaatcgttttggcgcaaaaaaacaggctgccgtacaaaaacacggcagcctgcggaaaaactttattttgcgtactccacggcgcggctctcgcggatgacgttgaccttgatctggccggggtaatccagcgtatcctcgatctttttggcaatggagcgtgccagcaggatgacctgatcatcgctgatgacgtcgggcttgaccagaatgcgcacctcgcggcctgcctgcacggcaaaggcctgctccacaccctcgaagctggaagagatctcctccagattttccagacgcttgacgtagctttccacgttctcgcggcgggcacccgggcgggcggcgctgatggcgtcggcagcctgaatgatgaaggccagcggggtcttgggctccacgtcgccgtggtgtgcttcaatggcgtggatgatctgggtgttctccttgtacttgcggcagatgtccacgccgatctggacgtggctgccctcgatctcgtgatccagcgccttgccgatatcatgcagcaggccggcgcggcgtgccatggtgacattcacgcccatctcgcccgccagcagaccggctacccaagccacttccatgctgtgggtcaaagcgttctgaccaaagctggtgcggtacttcagccggccgatcagcttgatcaggtcggggtgcaggccatggatgcccagctccatcaccgcacgctcgccctcgcgcttcatctgcagttccagatcgtggcggcacttttccaccgtctcctcgatgcgggcggggtggatacggccatcgccgatcagacgctccagcgtcatgcgggccacctcgcggcgggtctggtcaaaggaggacagggtgatggcttccggggtatcatcgatgatcagatctacgccggtagcagtctccagtgcgcggatgttgcggccctcgcggccgatgatgcggcccttcatctcatcgctgggcagcggcaccacgctgacggtggtctcgctgcaatggtcggcagcgcagcggctgacggcctgtccgatgaggttgcgggcgatgttatcgcagttttccttcaggtcggtctcataggcagcaacgcgcacggccttttcgtgggtcagctcctcgtccaccttgtgcagcagcacctcgcgggcgtcctcctgactcaagccggccagcgtttccagacgctccatctccttggcgcgcaaagcatcgatctctgccagacgctcctcggcttcagcggcgcgctttttcagctcttcttccttcttttccagcgcttcggtcttgcggtccagcgccgtctccttctggtcgatgcggttctcctgacggctgatctccgcacggcgctgcttgatctccttgtcggcttctgccttctgggcatcgacctcggctttcagacggaaagcctcgtcctttgcttccagaaccgcttccttgcgcttctggtcggcggtcttgatcgcctcgttcaccagccgggtagcctcggcttcggcgctgccgatctgggcttcggcggtctttttacggttgttgtaaccaataaaatagcccgcagccacaccgacagcaccaacgatcaaggccacgatcactccgatcgcggtcattgcgttcactctcctttgtttcaattcaatgcaaaattaaaagcaggagacgctgcgcagcaggacacgggcaatgatatagaaagagctttcaatccaaaaagtgagaccaaaaccatacgcaccaccaaaaaccggcggcacgggcaaaagcatacggcttttctctctacggttccattttatatcaaacaggcacgctttgcctgaaacgggtacagggtcacacagaagcctgcgtacagcgtctttgattccatactactaattatagtacgaaacatttgcccgcttgtcaagaggaaaaccctgcccgcagaacattttgtgcagaaaaacaaaaactggaacgaaactcccacccgtgaaaatgggatagcggagcgtccgcagacgctccgctatcccgaaatttatagcaattcaactttttaatgcaacagcaacagcgttgaattgcatatcgcaaatatgctgtttgactgttgcacgaatttcttgacttgcgataaaataatttttccgcttattccagatacatccgccgcagccgcatcaggcgggcgggggtcaggccgtattcggcttccagatagctctcggcgctgccgtagtcctgccggatggtgcgcagcacaaagggcgcaatctccgggtctaccccggcggaggactgccagcgcatccgctgcgccgggtcggcggcgatttccgccgcatggtcagccatggccttttcgatctcggcggcgcggcagaggttggtgcgggcgtaatccgcgcagatggtctcgtccgaagcgcccagcgccagcaggatcagcatggcggctacgccggtgcggtccttgcccgatgtgcagtggaacaggatgggcgtctcgccggcttccagcgcacggaacagctccttgaaggccttgttgccggtgagcatctgccgatatatcatctgggtgaggttcgtcccggcgggggcgctctgcaccagccgctggatgtcgttgggagaaaaatcgatctcctgcccggtggcatcccgcaggccgcagatctgcaccagccgtgcgccgtccggcacatagtccggcagctttgcggcttctgcgccgctgcgcaggtcaaggatgagccgcagccccagcccgtccagccgggcgcggtcggcttcggtggtcagccgcccggtggggaagccccggtagatctgcccccactttacggtcttgccctcatcggcatggtagccgcccagctcccggaagttgttgccgcccgcaaagggcagctgggtgcccggggcgggatgctccggggcagattttgcggcggcgctggaaagtaccggcgcggtgtagaagggctttgcaggccgtccccggcggggcggcaggctggcggtgctgcccagaacctccagcaggtagctgcgcagcaggtcgatataggcagaactggtgtcccgccgctgcaccagcgagacgcacagcgggggcatatcctccagcagcacgtcccgcacccggtccagctcccggcgcgcgccgggctcgtagcgggtcaggcaggtgcatagctgctcctgcaccagatagtaggcctgataaaagctggggccgatctcggcgttgggcgcaaagcccgcccgggcacaggccgcccacagcgggctgaacagatcctgccgcaggctgggcagcagcacccgctgcccgcgcagctctgccagcgggatgcgctccttttcccagaaggggtgtccccggggcaccagcaggcaggcggggtctgcccgcagggtggtgcgcgccagcacaggcgcggcacagccaaggtcgatgaccagacccgcgtccagctcgccctgctctaccccgtcggccacggcatcgttgtccagcagacggaaccgcatctccacatgggggtactgctgccggaacttgtccagctgggtctccagtccgggcagatagtccggcaccagcgccacgctgatgccgatgcgcaccggctgggcagactggatctctgcccgcagcgcggcctgcatctgctggaactgctccaccaccggggcggcgtggcgctgtaaactcatgccccggtcggtgagcgccagcttgtggtgggcactgataaacagcggcccgcacatctcggcttccagcgcagagatgctctggcgcagcgcctgccgcgacaggaacagccgctgtgcggcgcgggtataattcatttcttcgcacagggtcaaaaagtagtgcagctggcggatatccatggtctcctcccgggaaagtttgttcttgaaaaaagaataccgctttttcggcggaatgtaaagagaagggcagcgtatttttgttattgcctttagcgggctcgccctctcagtcaaagcctgtcggctttgccagattcccccttttgtcgctgcgcgacatcttcccccggcgcgggggaagtctttcctcaaagggagagcctttggcagtccacgcaaacttcatctccttgccaaggcctctccctttgggagaggtggatttgcgaagcaaagacggagagggcgaggatgctatccgttgtgctccttcaaaaaaaggaacaccggaacgcccgcaggtgttccggtgtcccgaagtttaaatagggaagatcagatcaggctcagagcttcttcatcgcccaccagaatgaagtccgggtgcagctgcagaatgcttgcgggcacctcgggggtgacggggccgaagaaagccttcttgacgatctcggctttgcctgcgccgttgaccaccatcagcaccttgcgtgcctgcatgatggtgcggatgcccatggtgtaagcctgcttgggcaccagatccacgttgccgtcaaagaagcgcttgttggcttcgatggtctcctgggccagatccacgcagtgggtgcccagatcaaaggcatcgtggggctcgttgaagccgatgtgaccgtcatggccgatgcccagcagctgcagatccacgccgcccacgctgcggatgacctcatcgtagcgcttgcactcggcttcggcgtccagattggtgccgtccggcaggttgatgtgggcggggtcgatgttcacatggtcgaacaggttgcggtgcataaagctccagtagctttccgggtgatccttgggcaggccgcggtactcgtccagattgacggaggtgacctcagaaaaatccagatctccctcgttgtagcgctccaccagcttctcataggtgccaacgggggtgccgccggtagccagacccagcacgcagtcgggcttcatgatgacctgcgcagaaatgatgtttgctgccttgcgggacatatcagcgtagtcctttgtacgaatgatcttcacgataaacgacctctcttcttcatttactcattgtgggcggcgcacagcggcacacacccgcatctagtccaagtttatcacatttgccgacggaaagccacaaaacggcacaatttttccgattttccgtttcttttggaaaaagtgccttaaaaactggttgaagtatcgttcttttgcacaaagggtgcgcgcagaagtcagtccgcaaagccggccttttgcagggcggtgagcagcagcgggatgagcaccagctgcgccacgatgcccggcacggcggtgaacagcgccccggacaaaaaggcgctgaagggaaagctgccgccggtcagccccgccagcacaaagcgcacgatgccccacacgatgcgcccggacaccatggcggtcagcagcacggcgtagagcgcgggcaggctgtgctttgccctgcgccacagcagcccggacaccagcccgtaggtggccagctcaaaggccatggagatggccaccgggaacatgggcggcatcccgaacagcaccgagcgcagcagcggggcggcaaaacccacagccagcccccacgggccgcccagcacaaagccgcacagcagcaccgggaagtgcatcgggcagagcatattgcccaccttgggcacctgaccggtgagcaggggcagcacaaaggccagcgctaaaaacagggcagccggcaccagctgccgcacggttttggtgtttttggttttcataagggaccctccattttcagccgcaaaataaaaaggagcctgccccggcattccatgccaaaggcagaccccttcgtggcgtctgtttcaaaaaaatatgcttgctggggaaagcggcaggctgctgcccgcccgtgcccggcttcctgtcggaacgatggtcaaaagtataacaaaccattttgcccctgtcaagcggggcaggatgtctgcaaaatagacaaaaatcggtctgttcgcaaaaaaatttccccggggctgtacattttactggaagaagcttgacctttttgcacagaatggataatataaaattgaaaaaaagcgcgctgcggcagtcttgacgccggggcgctgacgagaggcttttttgagcgcatgaattctgaggttcatacgggaggaccatcatgacaaatgctgaaaaacttaccctgaaaaagcacgcctgccacatccgcatgggcgtgatcgaagggacccacagtgcaggctgtggtcatccgggcggcagtctgagcatcgcagatgtgctgtcttatctgtactttaaggaattgaacatcgaccctgcccagcccaagatggcgaaccgcgaccgtctggtgctgtccaagggtcatgccgccccggcgctgtacgccgcgctggcagagcggggcttcttcccggtggaagagctcaagaccctgcgcaagatcggcagccgcctgcagggccaccccaacatgaacagcgtgcccggtgtggatatgtccaccggcagtctgggtcagggcatctctgccgcctgcggcatggcgctgggcgcaaagcacgccggctctgccgtgaacgtttacgccattctgggcgacggcgaggtggaagagggcgaatgctgggaggcctttatgtttgccgcccactacggcctttctaacctgtgcgtgatgctggaccgcaaccatctgcagatcgacggcaccaccgagacggtcatgaacagcgccccgctggaagataagctccgcgccttcaacttcaacgtggtcaccatcaacggccacgactttgaccagatcgagagcgccgtgcaggctttccacgccgagaccgaaaagcccacctgcatcattctggataccgtcaagggcaccggcgtttcctatatgaccaattccgttgcatggcacggcaagggccccaacgatgaagagtatcaggtggccatgaacgagctgaacgccgcctatgccgcgctggaacaggaggagaactgagatggcagacgtgaaaaagatcgcgacccgcgacagctacggcaacaccctgaaggagctggcagcggaaggccacgatgatctggtggtgctggacgccgatctggccgccgctaccaagaccgggatgttccagaaggcatacccggaccgtcactttgactgcggcatcgccgagggcaacatggtaggcgtggctgcaggtctggcagccatgggctatgtgccctttgtttccagctttgccatgtttgcagccggccgcgccttcgagcaggtgcgcaactctgtgggctatccccacctgaacgtgaagatcggcgctacccacggcggcatctccgtgggcgaggacggcgcttcccaccagtgctgcgaggactttgccctgatgcgcagcatccccggcatgaccgtcatctgccctgccgatgatatcgaagcacgcgccgctgtgcgcgccgcctacgccatggaaggccccgtctacctgcgcttcggccgtctggctgtgccggtgttccacgatgaggccaactaccactttgagctgggcaagggcgagcagctgaccgagggcaacgatattgccatcatcgccaccggtctgatggtcaacgaagcccgcatggctgccgagcagctggctgccgagggcatccacgcccgggtcatcaacatccacaccatcaagcccctggacgaggagatcgtcatcaaggcggcaaaggagtgcggcaaggtcatcaccgccgaggagcacaacgtcatcggcggtctgggcgaagccgtctgcgccgttctgagcgagaagcagcccacccctgtgcgccgcgtaggcgtgcaggacgtgttcggctgctccggccctgcatgggatctgctgaagaagttcggtctggacgctgccaccatctgcaagaccgcccacgagatgctgggcaagtaaaaacagtttacccctataccgccgtgcctttcgcccggcggtattttttgcgcctgcgtgacccggtcacggaaaagcgggcggcgtatggggtatactgaggatgtcagtaaaacaaaacacccattcaggagggaaaaaatatggcagtcatcaacattaccaaggaaaactttgcacaggaagtgctccacagcgaaaagcccgttctgctggacttctgggccagctggtgcggcccctgccggatgctgagccccgtggtggacgaggtagccgaggagcgcaccgatgtaaaggtgggcaaggtaaacgtggacgagcagccggacttggcggcacagttcggggtgatgagcatccccaccctgctggtgttcgagcagggtaagctggtgcgtcaggctgtgggtgcccgccccaaggccggtgtgctggagctgctgggctaaatgatgctttaaaaagggtacagcggagcgcctacgggcgttctgctgtacccctttttacggaaatggcgatatcaattcaaaaaaattatccatgcttctacaaatggaaccacaaaaccaaagcaaaagaaaaacaaaagatccagcacaactttcatccatctggcagagcgtgtaccgaaggacatggcatgaatgataaaaagattgatctcgccccggcggcgataatagcctgtctgttcaaagctgttccagatctccagcgataaaaattcaatgcctgcacacaacgggaaaatgacgagagaatgcatccagccgtctgcccgaatagaaccatcgccaagaccataccagtgcaccgcaatggtgccggggcaagccaaaacaccccacaaggcaagcgcaatgctcagcccaagcagggcggtgcgcacggaatgccaatctacggcgtgctgtcggcgcagcatggtaaagaaatcttccaattggacggtcggtgcggcatcggcttcttccggggcgcggcagtgcataaggtcggcaagggtcagccccagagcatctgccagcggttccagtgtgttgatatccggcagaccgatgccccgctcccagcggctgacagccttgtcggtaacgtgcagctgttcagccagctcagcctgtgtcatcccctgcgctttgcgcatccggctcagataatttccgaaagttctggcatccattttatcaactcccttggaaaaagcatagcataaggccgcgcaaaacgcaatcgacgctttgtttacccgggcaaaaagtgtttggatagcttgaatgcaaacagcaaagcgcccgccctgtggttcgagcagaaccacggggcgggcgcttattttatatggagttcagaagaaaaatgcgggtttcagcctacagctgggggcctgcggagaccagagccttgccgtgctcgttgccctcgtacttagcgaagttcttcacgaagcggccagccagatcctttgccttctcttcccactgagcggcatctgcgtaggtgtcgcgggggtcgaggatggcggggtcaacaccgggcagagcggtgggaacctcaaagtcgaagtaggggatcttcttggtgggagcctcgttgatagcaccgctcaggatggcgtcgatgatgccgcgggtatccttgatagagatgcgcttgccggtgccgttccagccggtgttgaccagataagcctttgcgccgctggccttcatcttcttgaccagctcctcagcgtacttggtggggtgcagctccaggaaagcctgaccgaagcaagcggagaaggtgggggtgggctcggtgatgccgcgctcggtgcctgccagctttgcggtaaagccggacaggaagtagtactgggtctgctccggggtcaggatggagaccgggggcagaacgccgaaggcgtcagcagacaggaagatcacgttcttagctgcgggagcagaagaaacgggacgcacgatgttctggatgtggttgatggggtaggacacacgggtgttctcggtgacagacttgtcagcgaagtcgatgtgaccctcggcatccagagtgacgttctccagcagagcgttgcgcttgatggcgttgtagatatcgggctcggagtccttatccagattgatgaccttagcgtagcagccgccctcgaagttgaacacgccgttgtcgtcccagccgtgctcgtcatcgccgatcagcagacgcttgggatcggtggacagggtggtcttgccggtgccggacaggccgaagaagatggcggtgttctcgccgttcttgtcggtgttggcagagcagtgcatggaagccatgcccttcagcggcaggaagtagttcatcatggagaacatacccttcttcatctcgccgccgtaccaggtgttgacgatgacctgctccttgctggtgatgttgaacagcacagcagtctcggagttcaggcccagctccttgtagttctcgaccttggccttggaagcgttgtaaacaacgaaatcaggctcgaagttctccagctcctcagcggtgggacggatgaacatattggtaacgaagtgtgcctgccaggccacttccacgatgaaacgcactgccatgcgggtatccttgttggcgccgcagaaagcatccacgacgaacaggcgcttgttggacagctccttctgagcgatctccttgacagccttccaagcctcctgagatgcggggtggttgtcgttcttgtactcatcgctggtccaccacacggtgtccttggagttctcgtccatcacgatgaacttgtccttgggagaacggccggtgtagatgccggtcatcacgttcacagcacccagctcgctgacctgacccttctcgtagccttccagcgcgggattggtctcctcggcgaacagctgctcgtaggaggggttgtgcacgacttcagtcgtgccggtgatgccatacttggtaagatccaactttgccatatttgcgtacctctactttcgtttgatccttacataactctgtgtaggagatgcagcgccatttatggtacggacaccgcataagggggagacagcacagaacgatgcaatgcaaattctcctgtctatcattatacacaaaagcttttcaaaagcaataaatggaatgttctgtttgcaaaaaagaaacaaatttcataaacagaccttcccgtataaagtaaattcacgaagcccggcagggatgcagaccgtgaaaaataaggcgggacgggagaaaaccgacattttgataaaactttgacaagcagggatacatggagaaacaggtcgccttgggcagttttgtccccgattttccgcaaactttgtctctttgtgcaatttttgcgttggttcagccgtttttgtggaaaaaggactttacttatgttatacttgttttataagaaacactttttccgtccgctgcggcggctatacatataaaggaaactgccatgaaaaccatctacatcctgctcacccgttccggcacgctgctgtccaagctggtctatgccgttaccggagccagctatacccacgcatccatggcgtttgacgaagagctgaactgtctgtacagctccacccgcaaaaacggctataccatgttcccggcgggtcccagcaaggaatacctgaacaagggtgttttccgcctgcgcggggatgccccctgcgcgctgtatgcgctggatgtcacagacgaggcctacgtccgcgcccgccgccgtgccgagcacatgatggcgcggggcgaattgtaccgcttcaacacactggggctgatcttgtgtgcactgcatatccgctggcagcgccgccggcattatttctgctcccagttcgtcagcgaggtgctggaaaagagcggcgcgatggagctgcctaaggacagcaccctgatgcaccccaacgactacgcccagctgccccagctgaagtgtctgtacgagggatgccttgccgacctgccccagcgcaaggccatggagctgggtgaagtgcctaccgtggtcagcgtgtatctggggctgatgctgggtctggccaaagccggggtgcgcaagattttttgaaaaaatatgaaattatgtgttgacaaagggtgcccggtatgctaaaatagccaagtcgggtgcgaacacctgatgcgaaaatggacgtatggcccgttggtcaagcggttaagacagaggcctctcacgcctttaacatcggttcgattccggtacgggtcaccattttatagtagtaaaacggccacgcgccgttttatatagatgcctctttagctcagtcggttagagcacctgactgttaatcagggtgtcgcctgttcgagtcaggcaagaggcgccagcaaagcgatggaaaatttccatcgcttttttctttttcccggcggccttgttgacagcaccgccccggggggctatacttagcattataataaagaaaacggaaaaaactccttccggcagggtcagacgccttgccgtactgccaaaggctccctccccgagggagctggctgcgaacaaggtgagcagactgagggagtttcctgtcaaaaggagaacatcatgaaaaaagttattctgaccggcgaccgtcccaccggccgcctgcacgttggccactatgtcggctctctgaaggagcgggtgcggctgcagaataccggcgaatatgacgagatctttatcatgatcgccgacgcgcaggcgctgaccgacaacgccgacaacccggagaaggtgcgccagaacattctgcaggtggcactggactatctggcctgcggtctggaccccaacaaggtgcacatcttcatccagtccatggtgccccagctgaccgagctgagcttctactaccagaatctggtcaccgtcagccgtttgcagcgcaaccccaccgtgaagagcgagatccagatgcgcaacttcgaagccagcatcccggtgggcttcttctgctaccccatcagtcaggctgccgatatcaccgcctttaaggctaccaccgtgcccgccggtgaggatcagaagcccatgatcgagcagtgctgcgagatcgtgcacaagttcaactccgtctacggcgaaacgctggtagagcccgagatcgtgctgccccagaacgccgcctgcctgcgtctgcccggcattgacggcaaggccaagatgagcaagagccttggcaactgcatctatctgtccgaggagccggaggagatcgagaagaaggtcaagtccatgtttaccgaccccaaccacctgcgggtgcaggaccccggcaaggtggagggcaacccggtgttcatctatctggacgccttctgccgccccgagcactttgccgagttctggccggagtaccagaatctggacgaggtcaaggcgcactatcagcgcggcggtcttggcgatatgaaggtgaaaaagttcctgaacagcgtcatgcaggctgagctggagcccatccgcacccgccgcaaggagtgggagcagcgcctgcccgaggtggtggagatcctgaaggagggcagcgcctacgccgaaaagaccgctgccgccacgctggacgaggtgcgcaaggccatgcgcatcgactacttcgagaacgataacctgctgaaataatatttatgagagagcccgaaacgcctgcggcgtttcgggctctcttttgcatcgtttacgaaaattgcatagaaactgcggccgcactatgctaaaataggggcaacaagtacagaaaaccccgttctgggggcgagaagaaaaaggagaaccaccatgcaaaagaccatctggatcaccggagcaagctccggcatcggtcgggagttcgcccgccggtacgccgctatgggctgtcggctcatcctgaccgcccgccgcgccgaccgtttgcaggctcttgccaaggagctgcacgcagcccacggcacggaatgccgcatcgagaccgccgacctctcccgcgccgaggagtgcagccgcctgtgcgaagtgctggccgatgagcacatcgacatcttcatcaacaacgccggtttcggcgtctgcggcagcatcctggaaacagaggaagcccgcgaggaagagatggtccaagtgaatgttgctgccatggcgcggctgttccgcgccgtggtgcgcaagatgcacgcacagggcggcggcaccatcctgaatgtggcgtcctctgcggggctgctgcccggcggcccctatatggcgggctactacgccagcaaagcctatgtggtcagcatgacccgcggcgtggccgaggagctgcgggagatgcacagcccagtctacgtctgtgccctctgccccggcccggtggataccgagttcaacgaccgcgccggggtggtgtttgccctgcatggcattaccccggagctgtgcgtggaggaagctctgctgggcatgatgcaccgcaagaccatcattgtgccctctgccttcatgcggctgtgcaccagcgcccagcgccttgtacccatccccctgctgatgcccatcgtggcacgccagcagaagaaaaagctggggtaaaagacaaaggtcgtccaaacttgtcaacaagcccaaagatagtcggaatatcttgtgcaccgtgacaaggtgcggcggtctgcacaagctgttgcgctaaaaagcaacggttctgcgtattgttttttggcagaaaagcaaaaatctaaagaaagtacaacaaaacttcacaagaatgtgccttgacacttcctgtaaaggatgctagactggtatacaagtaagagcgcactccggcacggccggatacgacgcgctttgcaaagtagcacggctgcaatttgcgccgtgtagaatacgatttttgacaggaggactttattatggcacagtgcactcccaaatcttttgacctgaccggcaaggtggcgctgatcaccggcgcatcctacggcatcggcatggcaattgcaaaggctatggcagccaacggcgctaccatcgtgttcaatgatatcaagcaggagctggtggacaagggtctggcttcctatgcagaggcaggcatcaaggctcacggctacgtctgcgacgttaccgatgaggacgccgtcaacgccatggtggcaaagatcaccgaggaagtcggccacatcaacattctggtcaacaatgccggtatcatcaagcgcatccccatgaccgagatgagcgctgcccagttccgtcaggtcatcgatgttgacctgaacgctcccttcatcgtggcaaaggccatcatccccgacatgatcgcacagggcggcggcaagatcatcaacatctgctccatgatgagtgagctgggccgtgagaccgtttctgcctatgcagcagccaagggcggcctgaagatgctgaccaagaacatcgcttccgagtacggtgcttacaacatccagtgcaacggcatcggacccggctacatcgctaccccgcagaccgcacctctgcgcgagatccagcccgacggcagccgtcaccccttcgaccagttcatcgttgccaagacccccgcaggccgctggggcgaggccgaggacctgggcggacccgctgtgttcctggcatctgaggcttctgactttgtcaacggcctgatcctgtatgtggacggcggcattctggcctacatcggcaagcagccccagtaagcgctgagggcactccgcagttcttgaccggggactgccgcacagcgttgtgtggcagtccccttttgtttgtacgggaaaggatgttatgctataatggaaaaagcacatcaggatatcccttgggtgccccatgccgaaatttccccggagccctgcggccccggggtgcagcgccgcgtgctggcgtacagcaaggacgccatgtgcgtggaaaacacctttgagaccggcggcgtgggtgccatgcactgccacccccacacccagatcacctatatcgtctccgggcgataccgctttaccatcggggacgagacccgggaggtaggccccggcgacaccctgctcaagcagaacggcgtcatgcacggctgcgtctgtctggagggcggcgtgatgctggatttctttactcccatgcgggaggactttgtataatccctgcgcaccgcagggaaaaataagaaggagaaccattgttatgaagatcgcacttatcaacgagaacagtcaggccgccaagaacggcatcattgaagctgccctgaaaaaggtggtggagcccatgggtcatgaggtggtcaactacggcatgtacgccgccgacgatgctgcacagctgacctatgtgcagtgcggcattctggctgctatcctgctgaacagcggcgctgcggactacgtcgttaccggctgcggcaccggcgagggcgctatgctggcactgaacagcttccccggtgttatctgcggccacgtggaggatcccgtggatgcctacacctttgcccacgtcaacgacggcaacgccgttgccatgccctttgccaagggcttcggctggggcggcgagctgaacctcgagtactgcttcgagaagctgttcggctttggtcacggtcagggctaccccaaggagcgcgttgtgcctgagcagcgcaacaagaagattttggacggcgtgcgtgctgccaccttcaagcccctcatcgagtgcctgaagagcatcgatcaggagctgctgaagggcgctgtggcgggtgccaagttctctgagctgttcttcgcctcctgcaaggacgaggagctggccgcttacgtcaagaccctgctgtaagctgcggaggagatcatgcaaggactgaccctgttcaacctgaacctcacccacctgctggatgcttttctggaaactgcagtgcccatgatcgccggtcttgccgaggtggtgggtctgttcatcatcatcaccagtctggccaaggccaccttctactatgtccgcgccaccttcttcaacgaccaccgggacttccaccatgaaatgagcagcggcctgaccaccgcgctggaatttctgatgtcagcagagatcgccaagaccttcctgctgcaaaatctggagtcggtggtgccgctggcggctacctttgcgctgcgcgctttgatgagtatgctgctgcactgggagatggagggtggccaccgcccggccaacgccaaggaaaaggacaagtccggctccccgaaggacggcaaaaacggctgacaggcaaaagatttgccaaactttagcacggcagagtttcaccgtgttgtgaaaaacgtaaaaccttgagatgaatacttgacaggtttgcacaaagagactatactcgtgccatcgaaagcaaaggcgctgacggaagcaattccgccagcgccttttgtgttttcggggatactgccgcacggagagaatagagggctccctgtgcaaaaaaacgaccgtaggaggtaggaaagtatgtttagctccgtcaacacctgctggacgctcgtaggagcgtttctagtgtacttcatgcaggccggattcgccctatgcgaggccggcttcacccgggcaaagaacaccggcaacatcttgatgaaaaacatgatggatttctgcatcggcacgccctgttactggctcatcggcttcggcctgatgttcggcggcaccggcgcactgatcggcggtttcgatcccttcattcagggcgattacagccacttgggtctggatatccccctgtgggtgtacatcgtattccagactgtgttctgcgccacggcagccaccatcgtctccggctccatggccgaacgcaccaacttcaaggcctactgcgtgtactccgccgccatctcgctggtggtgtaccccatctgcggccactggatgtggggcggcggctggctgcagagcatgggcttccacgattttgcaggttccgcagccgtgcataatgtgggcggcgtcatcgctctgctgggcgcttggatgcttggcccccgtattggcaagtacgataaggacggcaacccccacgccatccccggtcacaacctgaccgccggtgctctgggcgtgttcatcctgtggttctgctggttcggcttcaacggcggctcttccctgagcctgtccaccgatgccaccatgaccctgaccggtctggtctgcttcaacaccaacctcgccgcagccgttgctacctgcgtgaccatgatcttcacttggctgcgctacggtaagccggatgtctccatgaccctgaacggctctctggcaggccttgtggccattaccgcaggctgcgataccgtctcccccttcggcgctttcttcatcggctttgtggccggtatccttgtggtgctgagcgtggaattctttgataagatcgccaaggtggatgaccccgtaggtgctgtttccgtccactttgcaaacggcgtctggggcaccattgcggtgggcctgttctccaccggctccaacaccgcccatgccggtctgttctacggcggcggtctggcacagctgggcacccagctgctgggtttggtctgcgtggatgcctacgttgtcatcgtgatgttcatcgtctttaagatcattgacaagacccttggcctgcgtgtgcccgccgaggtggagatcgacggtctggatatccacgagcacggtctggcttccgcttatgcaggctttgccatctcggatgcaaactccgctgccatgacccccaacgagaacaccgatctgggtgaggatgacatcaccaaggcttcggcaaagcagatggatgcagccgtgccggtggtgcgtgagcctgtgatccacgatggcgtctacgacaccggtatgcataaggtgtccatcattgcaaagctggcaaagttcgatcagctcaagactgctctgaatgatctgggcgtcaccggcatgaccgtgacgcaggtcatgggctgcggcatccagaagggtacgccggaaaagtaccgcggcgtgccggtggataccaccctgctgcccaagatcaaggtggaggtcatcgtctcccgcatcagcgtggacgctgtggtggaagctgccaagaaggcgctgtacaccggccacatcggcgatggcaagatctttgtctacaacgtgacccgcgtggtcaagatccgcaccggcgaggaagactacgccgcgctgcaggatgtggagtaaccctccacaaaattctccgctgttcccgctgcggcggcagcccggctgctccgacacagtccccgccgcccggcgtgacagatagatcgttctcctttttccttttcctttttttgttcgaatcaacagtaagtcgaaagccccgctcctgcgcacaagggagtggggcttttgctgtgaaaaaagtgccccggaaacgccgacaggcgtttccggggcacttatcagttataccttacaggctgcgggtgcggatctcggtggtgaccttggcgatgaagtcctcaaggctcatctcggtggtctcgcccttgcggtcgcgcacggagatgttgccggcttcggcttccttggcgcccagcaccagcatatagggcacacgatccacctgctgtgcagcacggatcttgtagccgatcttctggttgtcgtcgtccagcacaacgcggacaccggcatctgccagcttctcggtcacgtcctgtgcgtactccagcgtcttttcggacacgggcagcaccttgacctgcgtgggagccagccaggtggggaacttgcccttggtctcctcgatcaggtaggccatgaagcggtccagagagcccagaattgcgcggtgcagcaccacgggggtcttttcggagccgtccttgtccacataggtcaggtggaactttgcgggcaggcagaagtccagctggcaggtggacagggtgtactcggcacccacggcgggcttcacgttcacgtccagcttcgggccgtagaaggcagcctcgccgatctcctcggtgaagtggatgcccagctcggtcagcacctcgcgcagagcgctctcggcgtggttccacatggcatcgtcatcgtggtacttcttcttgtcggcggggtcgcgcaggctcagcacgcagcggtaatcggtaatgttgaagtccttgtacacctcaaagatcaggttgcacacgtctgccacttcgctcttgatctgctccggggtgcagaacaggtgggcgtcgttctggcagaagtgacggccgcgctcgatgcccttcagggtgccggaggactcgtaacggaagtcgtgggcgatctcgccaatgcgcatgggcagatcacggtaggagtggggacggtttgcgtagatcatcatgtggtgggggcagttcatcgggcgcagcacatagctctcgccctccatctccatggcggggaacatattctcgcggtagtgatcccagtgaccggaggtcttgtacaggttcacagtgccgatgcagggagtcataacgtgcaggtagccgcgtgcacgctccttctccttgatatagttctccagctcctgccagacggtgtagcctgcgggcaggaacatgggcaggccgcggcccaccagatcatcggtcatgaacaggcccatctccttgccgatcttgcggtgatcgcgctcgcgggcctcctgctgctccttctcccatgcgtccagctcttcctgattgcggaaagccacgccgttgatacgggtcagcatcttgttttccttgtcgttcttccagtatgcgccggactgctgggtgatcttgaaagccttcagtgccttggtgtaggtcaggtggggcccgatgcacatatccacgtactcgccctgctggaagaagctgaactcggtctcgtcagccagatctgccatgtgctccaccttgtagtgctcctgacgctcctccatcagcttctcagcctcggcacggggcaggatgaagggcttgatgggcaggttctccttgacgatcttgcgcatctctttttcgatgttggccagatcctcgtcgctcagcttctggtcgcccagatcgacatcgtagtagaagccgttctcggtggcagggccgaaggcaaaatcagcctgcgggtacaggcgcttgatggcctgtgccataacgtgagcagcggtgtgacggataacgtgcagctcctgatcctgcgggcactcgtccacatgaccgtccttgtagatgatcttcatagtagattctcctttgacaatgcggtgttgaacaaaaacaaaaagcgcttcaccccgtaaaactcacgggatgaagcgccgatatatgtctgcgttccacggttccacccgaattgcgcgctccccggcggggaaacgcgcccctcgcagtgctgtaacgggcacgcccggcagaggttcgcctctgcactctgcggtggtagaagccggggtcatggcaggctgcttgcagcacccggaaacccggggcagccctctctgcggcatgaaaagcggggcttcagtttgtccgcatcaatgttttggacaggatgaaactacgctgattgtagcacgccggaacaaaaaaatcaagggatagcggcggaaatgtataaaatcgtcttcccctctgcgccttgccacaggcggcgaagcagtgtataataggcgcagaacgctacaacgccggaaaccccggcagatacaggaggaaatgaagatgaacaaaccggtactggtcgtcatggcagccggcatgggcagccgctacggcggtatgaagcagatcgacccggtgggccccaacggacaggtcattatggactactccctctacgatgcccgccgcgccggctttgagaccgtgatctttgtcatcaagcacgagatcgaggacgccttcaaagcagccatcggcgaccgcgtggcgaaagcaatgaacgtgaagtacgccttccagcagctggaagagctgcccgcaggttttgccgtgccggaaggccgtgtaaagccttggggcacctgccatgccgtgctggcggcaaagcccctcattgacggcccctttgcggtcatcaatgcagacgactactacggcccggaggcctttcaggtgatgtatgattacctgtccacccacgccgatgatgatttctaccgttactgcatggtcagctacctgctgaaaaacaccctgtccgagaacggcagcgtggcacgcggcgtgtgcatcaaaaacgaggacggcactctgcaaagcgtgaccgagcgcacccgcatcgagccctgcgacggcggcgcacactacaccgaggacggcggcgagagctgggtagacctgcccggcgacacccccgtgagcatgaacctgtggggctttggcaagagctttctggacgaggccgagcagcgctttgcgggctggctgaccgagaacctgccggtgaatcccctgaagtgcgagtacttcctgccgctggtggtgaccgagctgatcgaggaaaacaaggcgaaaattcaggtgctgcgcagcaccgataagtggttcggcgtcacctaccgggaggataaacctctggtggtggatgccatcgcccgcaagaccgccgagggtcagtaccccgaaaagctgtgggagtgagtgcccgcaatagcggaaaattattttaaccagaacaaagtcggacagcccgcaggctgcccgactttgtgttttcatggggtggaacgtatttacaaaaaccgttccagctggatgcggttatcctcttcaaaatcctgcaggcgctgggcaaggcgctttgcgcccggggcagcgttggggtagtctttgcagcttttcacgcagtccaccacccccatgccgctgccctgcgtgagcatctccgccagattgcgggtggatttgtccgtaagggtcttgagcccgatgcccattttcgtgttcagctttgccatggtgctctgcccctgcgcgctgccgccgcaggcttctatggcagtgtgtgcttcctgattcagctggtggtagatgttgcgctggcgcagcagctcggccttgaactgcacatcgttggtcatgggtaagatctgctccaaggtgttcttgcccatctcggtgttctgcaccaccgcttccagcaggttgaggttgtcgtttttctggttttccatacaaaaaatccccctttggcacttagtatgtgtccaaaaggggattttatacggttattttcaacagatcttattgccgccggagatctggatgccgcgcagccgctcgtcacagatggcgtacagacgctgccagcagttggcggcgctgtccagctcgtccagccctgccactgcgacgctcagggtgaaaggcacccgcttcatcatccccatggaggtgacgcactcgtggggcatttcggcgtagatgttccgcatctgctgtgccagctggccgccgtccaagtccagacagcccaccacaaaggtggtgccggtcaggcggcagacgatctgactgcccgggatgtcgaaatactttttccactggtttgccacaaagcagatcagctgatccatcaccggctgaccgtaggtatcccgcagctgtgcgccgtgatccagcgatatcagtgccacagcggccttgcgtccctgctccgcccagcggtccagttcggcggcgatcacggtctccagatagcggcggttgtacacgccggaaagaaaatcgtggttcaggtcctcgcggcacagctcccgctcgcgggcgctcatgcgttcttccggcagcaggttgcccgccagcggggcagacatggtgatccgccacagcttgccgtctgcccgcaccgtgcggtgcagcacgcagcttacccggccgttgcacagggcatagctcacctgtaagccctcgtcctgccagccggtgtcctgtggcaattcgtccagcaataccgtctcaaacgcagcctgtgcgccctcgacaaaggcgcgcagatcctgctctgtccattctctgtccatctgtaatttccccatcatcagtacgcgccgccgcttccgacgggcgaaattccaattttcccacaaatccgggaacttacggctattataccattgaaatacagatttttccagcaaaacgcacaaatttttacggcagtttttacaattctgtcagattgctgattctttcacgttttgaacgtctgcattgcagcggcagtacacggcgcactcggctttgatctgtgcggcaagggctttggagtcaaaaccggccttggcacgccatgcccagttgccgcccagcttgcccggggtgttcaggtgcgcttcggcacccagacccagccagtcgtacatgggaatgatggctctgtccgccaccgagcccagcgccgcccgcagcagcgcggtgcgcgcggcggcagtcttgacggctgctacctccttggcggtaggcttgcagggggtcaggtgcaggtaagccgcagcggtggccttttccttttcggaagcgccgttctcccaccagtcggtcagggtggtgttgtcgtgggtgccggggtagaccacgccgttcttgacgtggttatggggcagatactcgttgtccccgccgccgaaggcgaactgcagcaccttcatgcccgggaaggtgctgtcggccagcagcttgcgcacgctggggaacagttcgcccaagtcctcggcgatgatgggcagcttgcccagtgcggcttccagtgcatcgaacagctccatgccggggccgttctcccacttgccggtgcgggcggtggtgctggtggccgggatggcccaataggtgtcgaagccgcggaagtggtcgatgcgcagcaggtcgtagatgcccagcgcgtggcgcacccggcgaacccaccatgcgtagccggtctttttgtggtatgcccagtcgtacagagggttgccccacagctggccgtctgcggagaagtagtccggcgggcagcccgccacccgggcaaagcggccgtcggcatccagctcaaacagcttgccgcccacccatgcgtccaccgagtcggcagagacgtagatggggatatcgcccaggatctgcacgccctttttgttggcataggtcttgacggcctgccactggacgctgaacttgtactgcacaaacttccagaagccgatctcctcttcgtttgcggcagcaaaggcagccagcgcggccttgtcgcggcggcggtagggggcgtcccactccacccagttcttcatcttgttggcaatcttcagcgccatgtacagggcatagtcgtccagccagtcctcgttggcaagggtaaaggcgtagtagtcgtcagggtagtagtaagcacagccgtgcagcccggcgcactggctgcgccatgcggcgtaggccttgcgcagcaccgcaaagcggctgacgtacaaggtgccgtagtccacttccagcgggtctttgccccagctttctgccttgaggtctgcggcggtcagcagaccctctttttccagcgtttccaaatccacaaaataggggttgcccgcaaaggcagagcagctctggtaggggctgtcgccgtagccggtggggctgagcggcagcagctgccagatcgtttgtcctgccgcagacaggaaatccacaaattgaaatgccgccttgccaaagcagccgatcccgtaagggccgggcagactggataccggcatcagaataccactttcacgcatgatccgttaccttcctcgctgtcaattttcgggaatattcgttgattcctatcataacataaccgcaaactattttccacaggcaaaaatcgtggtatactggtttttatgaggtgccccctcagcttcgctgcgctcagcagctcccccaagggggcgcctaactccctcagtcaaaacctgacggttttgccagctccctctgggagggagcctttggcatggcggcaaagtttgcggctaaaccgcgaagctgcttgtccgagagtaccccttccgtctgctcccgctggtcgcagccaccttccccaaggggacggctttagcgctcccgtaagttttccgtttcacccggaagctttaccgtactgccaaaggccccatctccgagggggctggcatcgcgcagcgatgactgggggagttagccgtccccttgagggacgacttcccccgctccgggggaagatgtcgcgtagcgacaaaagggggcgtgtggattgccgcaaagcggcaagacggaaggggtactttgggcattttcaatcgttctatctacaggaggtactcgcgcgatgcagcgcacagaaaaatactttgagcaggacgctttccgcaccgggtgcgaaagcgtcatccttgccgcagagccggacgaaaagaccggcggcgggcgcattgcgctggacggcacggtgttctacccggagggcggcggtcagcccgccgaccggggcactctgaccctgccggacggcacggtgctgcgggtgctggacgtccacgaacaggcgggtgtcatctggcatacggtggatgccctgcccgctgccgcagcgcccggcgcagccgctgccggctgcatcgactgggactggcgtttcgataagatgcagcagcacactggcgagcatatcctttccggcattttgcaccagatgttcggggcggagaatgtgggcttccatgtgggcaccgaggcggtgcgcatggacaccagtgtgcccatcagccccgagggactgcggcaggcagagcttgccgccaaccgcatcgtgtggcaggatgtgccggtgctcatcagctaccccacccgggaggagcttgccgcccttgtctaccgctccaaaaaggcaatcgagggacaggtgcgcatcgtgaccatcccgggcgcggacgtctgcgcctgctgcggtactcatacccgcaccaccggtcaggtggggcagatcaagatccttgccagcgagaactacaagggcggtgtgcggctgagcgtggtgtgcggcgcgcgtgcactggcggcggcgcaggccatgcgcgcccgtcaggcggatatcggcgcgctgctctctgccaaggccgaccagaccgctgtggcggtgcaccgcgtatacgacgagtataccgcactcaagtttacacactttggactgtgcggccagctgtttgacgcccttgcgcagctgaccgcgcccgatgcagacgccatccgcaccctgccggggctggacccggacgggctgcaccgactggctgtccgcctgaccgaagccaccaccggcctgtgcgccgccctgacccccaccgaaaagggcaccggctactgccttgcccggcgggacggcgatgtgcgcgccctgaccaaggcactgaacgccgccctgaacggacgcggcggcggcaagcccggcatctgtcagggcagctgcgccgccaccccggagcaggtggaagcatttttgcgggagcaaaaataaactcccccagtcacggcttcgccgtgccagccccctctgagatggggcctctggcgaaaccggaaactttatgatctaaggtaaaaccttcccttcctgccaaaggctccctcccagagggagctgtcgccgtcaggcgactgagggagtttcacacaacatcaaggagaacaacaaactatgagaatgcgtttcaaaccctatgcccacgacgaactgatggccgcggatttccatgtgcacgagcccctcatctggggcggcaaatggcacggccagtatgcccgcccggagcagccctttattctggaactgggctgcggcaagggcggcttcatctcccagctggcctgcgcccacccggaaaataactatctgggcatcgacatcaccgacaaggtgctcattcttgccaagcgcaagatcgaagccgcctatcaggcagcggggcgtcccatcgacaacgtaaagatcatgagcaccgatatcgagcgcatcaagggcgttatcaccccggaggatgaagtcagccgcatctacatcaacttctgcaatccgtggagcaagaacgactcctcccacaagcaccgccttacctacccgcgccagctcatcgcctaccgcgagttcctgaaagacggcggcgagatctacttcaagaccgacgacgatgatctgttccgggacagcgtggagtacttccccgcttccggctacgacatcgaatggatcacctacgacctgcacgagaacgagccggcgtggaacatccgcaccgagcacgagggaatgttcaccgagatgggtattaaaatcaaggcgctcattgcccgcaaaaagcccggtgccgacagcgtgacatgggtagaccccaaggtgctcaagcggatggcgcgggaagctgccgccgaagccgccgcacaggaaggcgaaggaaatgtctgacccctgtgagctgtgcctgaataatgttcaggacgaatacggcagctactactgcgcacagggcgctgcgctggacgaggacgagatggcgcgctatcttgcgcacaataccgctgcctgtcccttttttgagccgggggacgaatataagatcgtatccaaacagaactgaagaacggaggtgcctatggtaagctttcttaccgataccgtggtatgcgggttctcgctgtaccatattctggcctattttctgatctattcctgcatgggctggtgtctggaggtcatctatgccgccgctaccaccggtcagctggtgaaccggggctttttgaatggcccggtctgcccaatctacggctttggcatgatcattgtgctgtttgcgcttacgcccttgcagcacagcgtcctgctgctgtatctcggcggcgtcatcctgcccagtgcgctggagctggtgggcggctgggcgctgtataagctctatcacacccgctggtgggattacagcgatttcccctttaacatcgggggctatatctgtctggaattctgcctgctgtggggcgtgggcacgctggtggtcatgcgcatcgtgcacccggtggtggcggaccttgtagccctcatcccgccctttgtgggggttatcctcatgtgctttctgtacgccgtgtacgcggtggacgtggtggctaccgccattgccgcctctgcactggccgatacgctggacaccatggagcagctgggcgacagcatccacgccgtcagcgatgctatgacccagctgctgggcaccaccaccctgaccgccgaccagaaactggacgagggacggctgcaattcaagcttgccgccgccgaggcgcgggacgccgccggaaaacgcccctctgcccgtgagacgctggctgccatccgcgccaaggccgccgaagccagcgaagccgcccgccgcgccagcgaggacgcccgactgaacgctgccgaagccgccaacgccgcccgtcttgctgccaaaggcactgccgagcgtgctgctgaattgttgcagctggaacagctggcggcagagctgcagcagcgcagcgaggagatgcaggcgcagctgctgcgcacgccccgcatcgtgggcccccgccgtatgctgcgtgcctatccgaaactccggcacggcaaaaaactgcgcagcctgcccatattgcgggagatgctgcaccgcgccgggcaggacgacaccgcgcagaacgacaacaaggaaaccaaatgaccccccatgccgcaccggcactgccgtgtgtggcatttttgttgcactttgctcgaataatgttgttagaaagtgtgaaaaacctatttcaaaacggcttaaaccgtgttatactgattacaaagtataccaattgaccgcaatcgacttgtccgtattgaatctatccaaattgtgaggaatcgtcatgtcagaggaacggaagaccaaaacagatgccgccgcaccggcatctgctgcgttacagcggatcgaccgcaaggacgcatttttacaggccctgcatacattcctgaccgcgcatcagggaacggaatgggctgtcgccgctgtggatatccagcacttcaagctttataacgagctttacggcaccgaaaagggcgatgttctgctggagactatggcaaactgtctgctgggctacagaaagcagaccggctatcctgtgggctattttggaaatgatgactttttcctgtgcctgccggacgaaaaggccgagcagaccgccgtgcttgccacgctgcaggcgtgcatggctgccggaaggcaggatgtcaccttctttgtggtaatgggcgtgtgccccgtgcaggcaaaccccggtgcggatgccgccaccctgtgcaactatgcccagatcgccggtgtaacgacaggcagcggctacctgcaccgctttgagcccaccatgctcaacgaactcaaggaacagcagctgctgctgggcgagctggagcgcgcactggacaaccacgaattctgcttcttcctgcagcccaagtgcaacagcatcacccgcgccatcgtgggtatggaagcgctggtgcgctggaaccaccccacccggggctgtgttccccctgccgagttcatgccgctgctggagcgcaccggccttgtgacaaggctggaccagtacatctgggaatctgtctgccagaccctgcagaagtggcaggaaagcggcagcaaccttgtgccggtgtcggtgaacgtttcggtgcaggatatcctgaacctggatgtgccgcagatctttgcagatctggtggaaaaatataagctggagccaaagctcctgctggctgagatcaccgagaccatggtggccgaggacacccagatggcggaaaacgccattcagggactgcaccgcaagggcttctcggtgatgatggacgacttcggcagcgggtattcctcgctgaatatgctcaaggataccaacgtcgatgccatcaagctggacatgaagctcatcgacatgaatcaggagaaccgcagcaaaggcgtgcagatcgtggagtcggtggtggatatggcgcaccggctgaacctgcccatcatcgccgagggcgtggagaccccggagcaggtgtccatgccgcaggcggcggactgcctgtactcgcagggctactatttcttcaagcccatgccggtggaaaacgccgaaaaactgctggcagatcccaccaatcaggattactgggatctgcgccgcgacctgatgcgccgtgaccgccgggtggaaaacccgggcaccgaaaagaccgcgctggccttgcaggcctaccagatctttaccgataacgtgctggagatctcgctgctgaaccttgccaccggtgcgtaccgggtgatcaaacgggacgcccgcctgctgggtgcagatctggaaaaggaagaggattttgtcaactactgcgaccgtctggtgaacgaaaagatcgtgcacgaggaggacgcagacctgttcttggagcagaccgatctggaagctttgcgctctgtgctgtaccacgccaccgcgccggagttctaccgctaccgcgagaacgtgtccggccagtatatctgggtcaccacagaggtgctgccctgccggggctgctgcgcccagaacccatgggcgaccgtgctggtgcgcaacgacgcacaggccgaccagctcagcgaggagctggacttctcttacagccacgacaccctgaccggccttgccaaccgcagccggtacgaaaccgacctgcgggagctgccccacagcggatacgaatccgtggtgtgcacctacattgatgtggtcgggatgcacgaggtgaacgagcatctgggtcaccgcagcggcgacgccctgctgtactgtctggcaaacgccgcccgcaagttctttgccaccagccgggtataccgcatcggcagcgatgaatttatcatcctcactcccaacgagccgccctacagcgtgtggagcactgcggaccggatgcgcgccttcctgaaggaaaaggactacgccatctcggtaggcatccagcagactaccgacctgcgccatctggacgaagccgtggccaaggccgaggctgccatgcggcaggaccggcagacctactacgagcacaacggccgcgcccgccagctggaaggcctgaacgaaaagatggagcgcaccctgcaggaaaagcgggatgccgagcactttttgaaggtgcttgcccccaaatacaagaccgtaatcgtggtggacttgcaggaggacaccgtgcgccccgttattgtgccggattacttccagaccattctggatacctgcggcggctctttccgggctgcgctgaccaactaccgcgacacgctggtagcgccggagaaccgggacggctttgcggatctgctggacttcggccttgtgcgcagcaccgtgttcagcagcaacctgctggagcaccgctaccacaagacggacggccgcagcttctgcatccgtgtgaccccctactcccgcagcggctcccatatcaacgaggtgctgtggatcttcgcggatgaagatgtagagtaaaatattcttgtatgctataaaagcagccagaccacccggtctggctgcttttgcgtttgacgcctgcaggagcgcccgggaattaccccttccgtcttgccgcttcgcgtcaagccacacgcccccttttgtcgctatgcgacatcttcccccggagcgggggaagtcgtccctcaaggggacggcttttggtggtggcggcaaggtttccggcatagcccaaaggcgtccccttgggggagctggctgcgaacgcagtgagcagactgagggggtgcccgccgcgcggctgtttccgcaggaaacaagcgcggcagcaaccgcttcccgctgcgtcccctcccgtgaaaaggcaattccggaaaatccgcagattttccggaattgcgaaattataaattacttttccgctgaagatgcgcagagcaacgcggagcgcattctaaatcgtcccggcagcaagaagtcgccgccttgcaaatgcgccgggatgtgctataatagaaatcacttatttcatacaatatatgtgggtatatgggcgcaccgcccgctgaacctgcaaagcaaggagcttttctatgcagcatctgtcccgaaccgtttctcccgccctgccgcacccctgcctgcgggcgctgcgggcggcttttccgcagactatcccggtgctggcaggttattttgtgctggggctgggctacggcatctatgtgcagtccttggggctgccggtgtggatgcccatgctcatgggcactgttgtgtacggcggctcgctggagttcgtgctggcaagtttgctgctgggcgcgttctcgccgctgtcggcctttttaatggcgctgatgatccaggcacggcatcttttctacggccttgccatgctggagcgctacaagggctacggctggcgcagcttttacatgatctttgccatgagcgatgagaccttttccatcacctgctcggcaacgccgccggaaggggtggacaagggctggtttatgttcttcatcaccctgctggatcagctttactgggtgggcagcgccgggcttggggctgcgctgggcaccgtactgcccttcagcaccgagggcgtggattttgtcatgaccgcaatgttcacggtcatcttcctgaaccagtgggaaaaagataagcagcacggcagtgccctgatcgggcttgccgtgccgctggtgtgtctgattgtatttggttccggcagctttctgctgccgtccatggctggcattctggtgctgctgctggctttgcgccgtccgatggaaaaagcagccggggaggtagaagaatgacagcagttcagatggggcttaccattgcggtgtgcaccgccgccaccatgcttacccgttttttgccgtttctgatcttttccggcaaggagcagcagccgccggaggtggtgcggtatctggggcgggtgctgcccgccgccatcttcgggatgctcatcgtttattgcctgaagggcgttaccccgttctccggcagccacggcatcccggaagcccttgcgctgctggctaccatcgcactgcacaagtggaagcaccagaccctgctcagcgtggccgggggcactttttgctatgtactgctggtgcagctggtgttctgaaaaagaggctcagtggtagaaggtgtcaaagttcacctgacggtagaaccgctgctgcagctggtcaaagctttcgcagttctgcgccagcagccacatacttttggtcaccacggcctcgatggtcatatcgtgggcttccaagaagcggaagcggttgcgcacccgcttgcccacctcgtacacgcccacgtcgctgccctcgtaggtgacctgagtagtcatgatgagcaccttatgggtggtctcgtaatcgcccagcccggcggcaaaggcgtccatcagctgctgcgggataccgcccacaccaaagctttctacgatgacgcagtcgtacagacggaagatctccgggataagcgccggggacatccccggcgtcagcttgagcaggaacacccggctgtccagcgtgcggctgaactccaccggcccggtgggccacggcgaggggatgtaccgcaccagccggtcgccctgcaccagcgccagctccgggaagttgaccgacgcaaaggcgtcgtagctgatggtcttgttctttttggcgcgggtgcccgcgatgacgtgcccgccaaacaccaccatcacgccccggctgcccgggtcgatggcgcagactacgctgtcccgcaggtttttcttggcatccgtgatctcgttggagatgggctgctgtgcgccggtgaggatgatgggcttatccgcattttgaatcagataggagagcgccgccgcagaatacgccagcgtatccgtgccatggcagatgataaagccatcgtacagggcatagttttcctgaatggcgcgtgccatcatgagccagtgctcctgcccgaggtcggtgctgtcgatgctgcacagcgccagcgtttccgggcagcacagttccttcagctccggcagatgggcaagcagttcctcgctgctaagcacgggcttgagcccctgctgggtgcgcacgctggcaatggtgccgccggtggtgatgaaaagcagacgttgtttggacataaagcaaaagccccctgtggcagtaatttcaacatgacaacagtatagcacacgccccggggcttgaacagtgcccgccgctcaaaaagtttttgcgacccggtcacagaagtccgcgcggctttggtgtataataagggcaatgaaccatgcaaaggagcaacaccatgtccaacattgttattgtaggttccggcccggcgggggtgtccgccgctttgtacgccgtgcgcgccggggtgcagaccaccgtgctgaccaagggctccggggcgctggcgcgcgccgaaaagatcgaaaactattacggctttgcccagccggtctccgggccggagctggaacgccgcagcatcgagaacgcccggcggctgggggtgcagtttgtgcagaccgaagccgtggggctgacatggaccgaccgcctgaccgtggaaacgctggcgggcgcgtacccggcagacgcggtcattctggcgaccggcgcttcccgcgccgtgccccgcatcccggggctgaccgggctggaaggccacggcgtaagctggtgcgccgcctgcgatgcctttttctaccgcggcagggacgtggcggtgctgggcagcggcgagtacgccctgcacgaggtgcaggcgcttttgccggtggtgaaaagcgttaccctgctgacgaacggcgcagccctgaccgcagatttcccgcccgaggtgaccgtctgcacccagaaggtggaagccattctgggcgaacagaccgtcaccggcgtgcagctggcgggcggtgcggtgcgggaggtatccggtgtgttcgtggcgctgggcgtggcgggcagcaccgcacttgcccggaagctgggcgctgccgtagagggcagccgcatcgtggtggatgataaaatgcagaccaccgtgcccggcctgtacgccgccggcgactgcaccggcgggctgttacaggtggcaaaagcggtctatgagggcgcgctggcgggtacggaagccgccaaggcgctgcgaaaggggtgagccgtatggcagaaacatctccgcacgcccggtgtctggcctgtgcgttcccgttctgggagcagctgaccccggaagagcaggagcggctgtgccgctttacccgcccggtgcactacgccaagggtgcccgggtgcacagcccgctggaaagctgcgtgggcattctgctgctgcgcagcgggcagctgcgctcctatctgctgtccgaggacggcagagatgtgacgctgtaccgcctgttcggcggggaggtgtgcatcctgtctgcctcctgcgtgatggatgcggtgaacatcgacctttacatcgacgccgaggaggacaccgaagcgctgtgcatcagcgcgggcatcttccggcagctgatgcaggagaacgtctatgtgcgctgctacgcctaccagatgacggcagagcgcttttccgacaccatgtggacgatgcagcaaatcttgttcatgagcgccgaccggcggctggcgatctttttgaccgatgagcttgccaagaccggcggcgaggatgtccgcatgacccacgaccagatggcaaggtacatgggctctgcccgcgaggtggtgagccggatgctcaaatactttgcgcaggagggctgggtgcggctgtaccgcggcggcgtgcaggtgctggataagcagaagctgcaggcgctggcaagaggaaaataacgttctcttccttgtgcggggacgatttggaatgcgctccgcttcgctctgcgcatcatcagcggaaagaatagtgttataatttgtggctcagaaacgcctgcgggcgtttctgagccactttttcacagaaggggtcgtaaagacaagctgcatctgccgcaccgcttcctgcggaagcgcggcgcggaaagcagaaagtcatgctggcagcgcgactgtttccgcaggaaacaagcgctgacctgccatttatctctacgaccccactcgtgaaaatggaataccggagcgtccgcagacgctccggtattccgaaattaataataatttttccgctgaaaatggctagagcacaagcggaagccatttaaaatcgttttgcagtacggtgcttatcaggccttctcagagggcttgctcaggtctacgctgcggatgatcttgcgcaccggcaggatgctcttggcgttcatggacagttcgtccacgcccatgcgcaggaaagtctcggtcagggcggtgtcagcgcccagttcgccgcagatgcccacccagatgccgtggcggtgaccggcttcaatggtcatcttgatggcgcgcagcacggcggggtggtgcgggttgaagaaaggctccagctttgcgttctggcggtccagcgcacaggtgtactgggtcaggtcgttggtgccgatggagaagaagtcgcactcggcggccagctcgtccgcgatgagcacggcggcgggggtctcgatcatggtgcccacttcaatgttctgtcccatcttgacgccctcagcggtcagctcggcgcggcactcttccagaacagccttggcgtcctgcagttcccgcaggctggtgatcatggggaacatgatgctcatgttgccgtaggcggaagcacgcagcagagcgcgcagctgggtcttgaaaaagtccttgcgggtcaggcagatgcggatggcgcggtagcccagcgcggggttatcctcgtggtccagcttcatgtaatccacggtcttgtctgcgccgatatcacaggtgcgcaccaccaccttgcggggtgcaaggctttccaccacctgcttgtaagcctcgaactggtagtcctcggtggggaagtccttgcagttcaggtagacgaactcggtgcggaacagacctacgccgccggcgtcgttctgctgcactgcgcccacgtcgcccatgccgccgatgttggcgaacacattgatggtcttgccgtccagcgtggtgttgggcttgcccttcagctcctgcagcagagcctgctttttctggtcctcctgctggcgctttttcaggctcttgagcaggtcgggggtggggtccacatacacacaggcgttgtagccgtccaccacagccatcttgccgtcccagtcctcctgaatatccttgcactggatcagggcggggatgttcatgctgcgtgccagaatggcggtgtggctgttggagctgccctcgcgggtgataaagcccagcagcaggctcttgtccatgcgcacggtctcggagggcgccagatcctcggctaccagaatgctgggctcggtgccctgcagggaagcgttgtccaccccctgcagaatgtccagcatggcctgcgcaatgtccagcacatcggcgctgcgggcctgcagatacgggtcgtccatggcagagaacaccgcagcctgattgttgccggcggtcttgacggcgtactcggcgcacatcttctgcccgttgatgatctccttgatggcgtccacaaagtcgtcgtcatccagcatcatggcgtggatgttgaacacctcggcaatgtcctcgccggcttctgccagtgccttttcgtacagggcggtctgctgctcaatggccttctggcgggcagcttcaaaacgctccagttctgcggcggtatctgccacaggagcggtggaaatcgcggtatcttttttcttgtagatcttcagcttgccaatggcgatgccattgagcacgcttttgccggtgcctacctgcatagcacgttctccttccacttacagccggggcatacagcgcccggcgttttgtcaaaaaagcccccgcagttttcccgcgagggctcggcttttaagccgcggctcagacgttctcgctcaggaacttctggatggcctctgcggctgcttcttcatcatcgccttcgaccttgatggtcacggtctcgccctgcttgacgcccatgcccatcagagccatcagcttgcgcatatcgcagctcttgccgtccttctcgagggtagcggtgcttgcaaagcccttcacggtcttgaccagcagaccggcgggacgggcatggatgccgcaggcatccttaacagtgtactgaaattccttcataatcattttctccttacttgatccctctgcccggactgcacattcagtcccggagcatggctttgccaatggggattggtatactactattataaacccgtcccggtatttttgcaccgtttcatattgccgatttttacaagaattttttgttatatttgaacatacggatgctacaaaaatccgtgttttgtctaatttttgtcgaatcgtttgtaaaaactaggcagtttgtgcaactgccggacaagagcttaaaaaaggtcgtttttcctccgaataccgtccctattccacggggtacccttctgcgtccaacggcagctcggtgtagggggctgcctgcggggcggcttcgggctctgtctccggctcgccggaggtctgctgtgcggtgctgtcggtcagctgctcgtcgtgccgctcgccccagtcgccgctgtaatcctcgccggaggtctgctttgccagctcgttctgggcgtcctgcagccccagcaccgtgccggagggcttttccagcagatacgcgcccacggctttctttttgtacaccagcagcaccccgtagcggctggtctcgccgttgcttgccgccgggagcagcgccgaccatttttccaccgttttgcccttgtagcgggcaagatccatgccgctttgctgcaccaccccgttgaaagcggaaaagctgtcgtcccacttacgggggatcttgaccttatccgccgtgatggacgcgccgtccacctccagcccgtagccggtgaaccatgtctggatgtcctgcgcgctctcgatacggttcaccggggcagccaccgccaccgtccgggtactaatgaatcgccccagcatggcgctgaacaccaccagcgcgcagcacgccgcccctgctcccagttttttcaggctcgtcttgctcagtgttaccacaaacatatccccatgcctccccgccatttgcgcttgcatactctgccaccagcttatgcacaaaaacaggggagtatgccctgtttttgcggcaggggggatgatttagaatgtgctccgctgcgctctgcacatcatcagcggaataattattttaaatttcgcgtttgtcgcgctctgcggagcgctccaaacgcattttcacgagtggggtcgtaaagacaagcggcagatgtttaccgatttgtccctccctgtgaaaaagggtttcaggaaagtccgcagactttcctgaaacccaaaataaaaaatattctttccgctgaatatggccaaagcgcacgcggcggccatttaaaattgtcccacggcaagaaaaaagctgctgcacagggcgtgtgcagcagcctttgggttgttacccgatatagctgatattggcgtccagctcgccgctgtaaccgttgatgcgggccttctcggtgccctgccacaggtcgcagccgatggggctggaagagacgccgtagtgggcgttccagatggtgtagcggctgcgcagggtgttgtagtccacccgcttgcggtaccatgtggtggaagcgtacacgccgggcttgtagcccagctcctttacccgctcgcagaaggcgatggcgcacttggtgcgatcctcaacgcccagaccatcggcgcggccggtgccgcccggggcggtggaagcctcggtgtcatagaaaatggggtagtccagcatccggccgttcagcgcccagttgcagccctcggcctcctcctgcgcttcggcctcgtttacggcctgcgtaaagaaatacacgcccaccttcagtcccgcgttgcgggcattggtgaagtgctcttcgaacatggggtccttgactaggtttcccgcagcaccgtagccacggtagccgatgcggatgataacgaagctcacgccggattttttgatcttgttccagtccagcccggactgatacttggacacgtcgatgccaaaggtcacattgtcctgctttacgccgttggcgtcaaaataatacagcttgccgtcaatggagcgcagaccggtgacctttttgttggtgtcctgtgcgtagtagtaggtcttgccgttctcggtgcgccagccggagtacaccggctcttcttccctgtctttggtgccgaacagccagttgaacagccaccggaaaaagccgttttcatcggtcaggtcgatgcactgtgcttcggcatcctccagcgcgccggaatccagtgcctgctggatctgctccggggtcagcagtacgctgtcctccggggtgtgctggctggcggtatcgttctgggcggtgccgtccgctgcgggagcctgcgggtcctgcgcggccaactccggggtctcttccagcagcatggcaggggcgttctcctcttccagggcggtatcctcagcggactgtgccggtgcttccggtgcttccggcgtttcaacagcttcttccggtgcagccggtgcaatttcggcggtttccggtttttccgtttgcaccggggcaggctcagcctgctgcgcggtgctttctgctgcctgttccggggcggcggtcactgtgctctccgcttccggggcagggtcagccgctgccgggctgcttgcctgcggcgtcccggcggtgatgtggggcacgactgcgcccacggtcaaagtctccggctgtgcagacagcagggtcgctgcccctgcgccgcccacagccagaaccagcgccatggtcagcgctgcaacggctgccgccgctttgcggcgggctgtgccggatcggtcaaatcgttttttcatctgtcgtctctgcctccgaatctcccggtggtgcagcgtagcgctgcccgggtctttgcccccttgcccggggcgggcctgcttttattccacgccgcccatggattcaggataaaaaggacggcggataataactttacgcttcctctagtatacacccgcacgcggggagcagtcaacggcacagcgggcttctacacaaattctccaccggggcagtgtgtcggaaaatgttccaaatggaatacgttccggcggggcagaacattgcacaaagccgaaatttcacattttttccagcaaccccttgctgtcttgacaggtgtatggtatgatacagggcatacgttcgtaactttaacgatctgttttggatagaaaggcaagttttatgtcgaagctgaaagaatttttggcgcggaaggatatcgtcatctctccgcagcgttacctcattgacgcgctgggcgcaatggcacagggtctgttcgccagtctgctcatcggtaccatcatcaagacggtgggtcagcagaccggtcttgccctgctggtggatctgggcggctacgccactgccatgagcggccccgccatggcctgtgccatcggctgggcactgcactgcccgccgctggtgctgttcagcctgatcaccgtgggctactcggccaatgcgctgggcggtgcaggcggcccgctggctgtgctcatcatcgccattgtggcggcagagctgggcaaggccgtgagcaaggagaccaaggtggatatccttgtcaccccgctggtgaccatctttgcgggcgtcgggctgtccatgctcatcgccgcccccatcggtgcagccgcaagtcaggtgggcacccttattatgtgggccaccgagcaggctccgctggtcatgggcattctggtgtcggtcatcgtgggcgtggcgctgaccctgcccatctcctccgctgccatctgcgccgcactgggtctgaccggccttgcaggcggcgctgccgtggcaggctgctgcgcccagatggtgggctttgccgtgatgagctacaaggagaacggcgtgggcggccttgtcagtcagggtctgggcaccagtatgctgcagatgggcaacatcatcaagaacccccgcatctggatcgcccccacgctggccagtgccatcaccggcccgctggctacctgcctgttccactttgagatgaacggcgcggcggtgtcctccggtatgggcacctgcggtctggtgggtcagatcggcgtttacaccggctgggtcagcgatattgccgccggtaccaaggccgccatcacccccatggactgggctgctatggtgctgctgtgctttgtgctgcccgccgtgctcagcgtggtgttctgcgcggtggaacgcaagctgggctggatcaaggaaggcgatttgaagctgaactaaatagttatagtaaaaccaccggagcatctgcggatgctccggtggttttgtttgtagggggacgaactcccccagtcacggctgcgccacgccagaagctccctccccgagggagctggcaaagccgtcaggttttgcctgagggagtcccgcaaaaccccatgaaaaaatacacttagattgcataaaatgcgcatatatttaaaaataattgcataaagatacagattaaaccaaaagaaaagcgaaacgggcgctatgtttggcagtttttagcattgacggaaaacccgcgctgcgtataataaaagcatcaaccgcaaacgaaagacagaggatgcgaagggaaatgcgcatcagagaacaaaagtgtatttttattaaaaggagcgcgtttatcatgaaaaaggaaaacatcaaaaaagtcgtgctggcttactccggcggtctggatacctccatcatcattccctggctgaaggaaaactacaacaactgcgaggtcgttgctgtttccggtgacgtaggtcagggtactgagctggacggtttggaagaaaaggccaaggctaccggcgcatccaagctgtatgtgctggacctgaagaaggactttgtggagaactacatcttccccaccctgaagttcggcgcaaagtacgaggactacctgctgggcaccagctttgcacgtccgtgcatcgccaaggcactggcagacatcgccatcaaggagggtgcagatgccatctgccacggctgcaccggcaagggcaacgatcaggtgcgttttgagctgaccctcaaggcactgtgcccggatatggccatcatcgctccgtggcgtgagtgggacatcgagagccgtgacgaggagatcgactacgccgaggcgcaccacatccccctgaagatcaaccgcgagaccaactactccaaggacaagaacctgtggcatctgagccacgagggtctggatctggagaaccccgccaacgagccccagtacaataagcccggcttcctggagctgggtgtcagccccgagcaggcacccgatgttcccacctatgtgaccattcactttgaaaagggcgttcccaccgccgtggacggcaaggagatgggcgctgtggagctggtggagtacctgaataagctgggcggcgcaaacggcattggtctgctggacatcgtggagaaccgtctggtgggcatgaagagccgcggcgtgtacgagactcccggcggcgccatcctgtacaaggccatcgacgtgctggagaccattacgctggataaggagagcgctcacttcaaggcacagctggcacagaagtacgccgatatcgtgtacaacggccagtggttcaccccgctgcgcgaggcactggatgcctttgccgacagcctggagaagactgtgaccggcgatgtgaagctgaagctctacaagggcaacatgatcaacgccggcgtcacctctccgtacaccctgtacgatgagcagaccgcttccttcggcgtcgataaggattacgaccagtccgatgccaccggcttcatcaacctgttcggcctgtccatcaaggagcgcgcaaagctgtccaagagctggccggaggtcaagtaatcgcaacattttcgactgcgtgtgttttcacactttcacacgcgggttctcacaccggcatcgttgccggcggcaccgccgcaggagcgttttcccctgcggcggctttgccgtttttataaggagtttatattatggcagaacaactctggaagggtcggttttccaaggcggtggacagccgcgtcaacgacttcaactcctccatccgcttcgatcagcggatgatcgcgcaggatatgcgcggcagcggcgtccatgccgccatgctggcacggcagggcatcatctcggagcaggactgcacggatatcctcagcggtctggcctccatcgcggacgacctgtccagcggtgcgctgaccatcgaccccgccgccgaggacgtgcacacctttgtggagcagaccctgaccgcccgcatcggggatgcgggcaagcggctgcacaccggccgcagccgcaacgatcaggtggcgctggatatccgcctgactttgcgggattacagcaaaactttgcaggcttacatcgtggagctggtgcgggtgctgtgcaaaaaggctgcggagaataccgccgccgtcatgcccggctatacccacctgcagcgcgcccagcccatcaccttcggccacgcgctgatggcctacgcttccatgctgctgcgcgaccttgaccgttttgcggacgccaccgcccgcatggacagccagtgcccgctgggctctggcgcactggcaggcaccacctacccgctggaccgggatttcaccgccgaaaagctgggctttgccgccccctgtgccaacagtctggacggcgtgtccgaccgtgatttctgcatcgagctggcaagcgccatctccatctgcatgatgcacctgtcccgcctttcggaggagatcatcctgtggtgcagctgggagttcaagttcatcgagctggacgatgcctttaccaccggctcgtccatcatgccccagaagaagaaccccgacgtgaccgaactcatccgcggcaagaccggccgggtgtacggcgacctgaacaccctgctggtgatgatgaagggcctgccgctggcctacaacaaggatatgcaggaggacaaggaagccatctttgacgcggtggataccttggaactctgcctcaagaccatcacccccatgctggataccatgaagaccctgcccgccaatatgcgccgcgccgccgcaaagggctttatcaacgccaccgactgcgccgactacctgaccaagaaggggatgcccttccgggatgcctacaagctgaccggctgcatggtgtcggattgcattgcctccgacaaaacgctggaggagctgactttgacccagttccagacctacagcccgctgttcggggccgatatctatgatgccatcgaccttgtgcactgctgcgagggacgcaccagctacggcggccccagcgccgccagcgtccagcgccagatcgcgctggcaacggcgcggctggacgcatgggaggaggaaaacgcatgaaggtaaaggtgtttattgatggctcttccggcaccaccggcctgcgcatcgccgaccgtctggcagcccgcccggagatcgagctgctgtccatctccgccgaagggcgcaaggacgtgcacgagcgggcaaaggtcatcaattctgccgaccttgccttcctctgcctgccggatgcagcttctaaagaagtcatgcccctgctgcgcccggacgtgaaggtgctggacacctccaccgccttccgcaccgacgccgcatgggactacggcttcccggagctgaaggggcagaaggaaaaaattcagaactcttaccgcgtggcggtgcccggctgctatgccagcggctttatcagcattgcccgcccactggtggagctggggctggtggcaaaggactacccctttagctgcaccggcatctccggctactccggcggcggtaaaaagatgatcgcggactacgaaagccccgaccgcccggcgcacagcaagctggatgcgcccaagagctacggcctgagccttggccacaagcatctgccggagatgcagaagatcagcggccttgcgcacacgccgatgttcgtgccggtggtgtgcgactactactgcgggatgcaggtgctggtgccgctggatcttggccttgcgggcaccactgccgaagccgtagctgccgcccttgcggactactacaaggacgctgccaccgtgaaggtgcacggcctgaacgagccgctgccggaaaacggcctgtactccaatgccatggcgggcaccgaccgcatggagctgtacctgaccgtgaacgccgccggagatcagatgatgctggtctcgctgtttgataatctgggcaaaggctcctccggtgctgccgtccagtgcatgaacctgatgctgggtctggaagagaccaaagggttggaataaacttgtttttctttgtgggaaaggaaaatcgttatgcagtataaggaagttgcgggcggcatctgcgcgcccaagggctttgccgccgccggtgtccattgcggcatccgggcaaatcacagcgaaaaatatgatctggcgctcatcaaggccgaggtgcgctgcgctgctgcgggcgtgtacaccaccaacaaggtctgcggtgcgcccatcaaggtggaccgcgcccatctggcagatggctacgcacaggccattgtggtcaacagcggcaacgccaatacctgcgccgccaacggcgtggcactggccgaggagtgctgtgcactggtgggcaaggcgctgaacattgacgaaaaggacgttctgcccgcctccaccggcgtcatcggtcagcccatggtcatcgacccctttgcccggggaatcccggcggcggcggaaaagctggctgccaccgcgcagggcagcacggacgccgccactgccatcatgaccaccgacacccataaaaaggagtacgccatccagttcgagctgggcggcaaggtgtgcaccgtgggtgccatcggcaagggcagcggcatgatcgcccccaacatggctaccatgctggcgttctacaccaccgacgccgccgtctcgcccgcgctgctggaaaaggcgctcaagaccgttgtgcccggcacctataaccagatgagcgtggatctggacacctccaccaacgataccctcatcatcatggcatccggtcttgcgggcaacccggagatctgcgaggagaacgcggactacgccgcctttgtggcggcgctgaccgccattgcagagcatatgtgcgccgagcacgccggagacggcgagggtgccacccacctgatcacctgcgaggtgacccacgcgcccgacctcaagaccgcccgcgccgtcagccgcagcgtggtctgctccaacctgttcaaggcggcggtctttggccgcgatgccaactggggacgcatcctgtgcgccatcggctacacccccggggatttctccattgataaagtctgcgtccggctttccagcaaggcgggcgaggtgtatgtgtgcgagaacgccgcctaccacccttacagcgaggacgaagccgccaaggtgctggctgagcacgatattctggtcaaggtggatatgggcaccggcgatgcaagcgccaaggcatggggctgtgacctgacctacgactatgtgaagatcaacggcgattacagaacctgacaggagcgcgaaacagatgaaaaacgaagaaatggcgcggcttttttcggaagccaccccttatatccaaaagtaccatggcagaaccatggtcatcaagtacggcggcaacgccatgatcaacgagagcttgaaaaacgccgtgatgaacgaccttgtcaccctgacgctgctgggcgtgcgggtggtgctggtgcacggcggcggccccgccatcaacgagatgctcaagaaggtgggcgtggagagccactttgcaaacggtctgcgggtgacggacgatgccaccatggagatcgtgcagcaggtgctggccggtaaggtgaacaaggaccttgtggcaaagctgcgcgggcgcggcgtgggtctgtgcggcatggacggacagatgctccgctgcaccgagctggacccccagctgggtcatgtgggcgagatcgtccatgtggacgccaccctgatcgaaagcctgctggacggcggctttatcccggtcatcgccaccgtgggcatggacgacctcgggcaggcgtacaacgtcaacgccgacactgccgcggcgcagatcgccattgccctcaaggctgaaaagctggtgtccatgaccgatatcgcgggtctgctgcgggataaggaggacgagaccaccctcatccccgaggtggaggtgaccgagatcgagggctacaagtccgccggcatcattgcgggcggcatgatccccaagatcggcggcatggcagatgccatctatcagggcgtgcacgaagcagtcatcattgatggccgcgtgccgcactctatcctgctggaactgttctccgaccgcggctccggtacccgcttctaccgccgcagccaccgcgaataaaaagattgcgcaatcgccggcggaaagttataataaaggcaacgaaaccgctccgctgctgcgcggcggttggcataatgctgatgctattattttagcggtctcgccctctcagtcatcgctgcgcgatgccagctcccccaaagtgggagcccttggcagtccacgcaaggttcatctttttgccaaggcctctccctttgggagaggtgtcaccgtaggtgacggagagggcgaggacgctgcccgtgtgcagcaatgttccgagcgtcagccgcaaggctttgcgcaatcgctccatgttacaggaggtacacctatggattctgaaaaagtcatcaagcgggacaacgagtacgtcctgcacacctataaccgcagccccatcgtgctggaaaagggccacgggctgtacgccgagggcccggagggacagaagtatctggacttcaccagcggcatcggggtaaacagccttggctactgcgaccttgcttgggcagaagctgtgtcccagcaggcacacaaattgcagcacacctccaacctctactataccgcgccctgcggcaagctggcgaaaaagctgtgcaagcgcaccggcatgagtaaggtgttcttcggcaactccggcgccgaagccaacgagggcgctatcaaggccgcccgcaagtacagcgtggatcattacggcaaggaccgctacaacgttatcacgctggtcaacagcttccacggccgcacccttgccaccctgaccgccaccgggcaggaggtgttccacaactacttcggccccttcaacgagggcttccagtacgtcccggcgggcgatatcgaggcgctgcgggaactggtagaccgccacacctgcgccgtgatgatggagctgattcagggcgagggcggcgtgatggcgctggacccggagtatgtgcaggccgtgcgcgctttgtgcgacgaaaaagaccttgtgctcatcgtggacgaagtgcagaccggcgtaggccgcaccggcaccttcctgtgctgtgagcactataacctcaagccggacatcgtcacccttgccaaggggctgggcggcggcctgcccatcggcgcggtgctgatgaatgaaaaggtagccgagggcatgacccccggcacccacggctccacctttggcggcaacccggtggtctgcgccggtgcaaatgtggtggtggaccgcctggatcagagcttccttgcacaggtcagcgagcgcgccgtgcagctgcgcaccggcttggcaaagctgccccacgtcaagaacatttccggcatcggcctgatggtgggcatcgaattctttgacgtgcaggctgcggatgtgctggctgcctgccgcgaaaaaggcttgctggtgcttaccgcaaagacccggctgcgtctgctgccgccgctgaccgtctccgagcacgaggtagatatggcgctggaggtgctggccgaggtgctgggcacgatggagccgaccgctccgaaggagcaggcatgaaaaatctgctgaaaatgggcgacctttcccctgccgagctgacccacattctggatgtggcagaccagctgaaagcggactgcaaggcaggccgcaccgccccgctgctggcgggcaaaagcgtggcgctgctgttctccaaggcatccacccgcacccgcaccagctttgaggtgggcgtgtatcagatgggcggtcttggcaactacataaacaccgccgaattgcaggccgggcgcggcgagcctttgcgggacaccgcccgggtgctggggcgctactacgactgcgccgtctggcgcacctaccgccagcgggacttggaagagctggcagagctttccggcattccggtgatcaacggccttaccgactacgcccacccctgtcaggtgctggcagacctgatgaccatccgggagcgccggggcacgctgacagggctgaaactctgctttgtgggcgatggcagcaacatggcaaacagcctgatcatgggcggcctgctggcggggatgcaggtatcctgcgtctgtcccccgggctaccgcccggcagcggatgtgctgatgtttgcccacgaatacggcaatgccttccacctgaccaccgaccccgccgagggcttgcgggatgcggacattgtagccaccgccgcgtggaacaccaccgcccccggcacggctgaaagcgagcagcgtctgcgggattttgtgggcttccagctcaccggccgtctgctggaaaacgcaaagccgggcgcgctggtgctgcactgtctgcccgcccaccggggcgaggagatctccaccgccctgttcgagcagcacgcggacgagatctttgacgaagcggagaaccgtctgcacgtccagaaagccgtgctggcggtgctgctggcgggcaagtaagacgatttgaaatggcctccgcgctgctctggccatcatcagaggaaaaatattttaaatagagcaatgccggagcgtctgcggacgctccggcattgcattttcacggggaggggtcgtaaaggcaagcggcatttgcagtgccgctttctgcgaaagcgcggcgctgcggggcagctgccgcttccggttacagcccctcctgtgaaaatagcgtttggagcactccgcagagtgcgacaaacgcgaaataaaaataatctttccgctatttatgcgcagagcgcagcggagcgcattctcaatcgtccacacctcccggggaacaccctctcagagggagctggcaaagccgtaggctttgactgagggagtttttatcacgcacttacaatataccccccccccgtatggtgattttgcccatatttttgtaccaaattttggcagatgcggcgggcgaaaatgctttatttccataaactttagtgttatactcaacttggccttttgtccgttccggttgttccatttgggggaatagccgggcaaatcgatcaacaaaggagaggatatcatgaaaaaacgcatcgtgagcatgatactggcgctcagtatggtgctctccatcctcccggtatctgcatttgcagatgctgggacgtctgctgcggcagcagagacgacagctgccggtacgaacgaggaaacaacaaattccgtcgttacgatcaagatcggcgcggacggtctgcccgaagagcagtccggccctggctggagccgcagcgaatccggtctctcgctgaccatcaccggcgttgaaaacgcaaagacagagtacattctggacggcgagtacaactggaatgtggccatcacaaattccggcaatgaagtatatctgctggacggcgtggtcaagggtcagctttgggtcggcaacccggatgcctgcgttctgggcggcagctacgccgaagcagtgctggaaaacggcaccattgacggcggcacctacggtaagctgaccgagaacggcggcagcgtcaagggcggctacttcaaggatatttccggcctgcagtccgctacgcagcagcaggcacacaagctgatcctgccgccggaggactgcaccctgaacggccagccggtgaccggggatgtgtatatgctcaagcggtacagcgatcacaacctgaagctgaaggtgcagtacgcccccggctgcgttgcatgggcggcagcaatcggtggcacgtccgacatcacctccctgcctgtaggtatcagcaacgtctccttgaacggctatggcacgatttccatcagtggagacggtacaacgatctctgccgaggtcagtatgttcccgccgctttcagagagcaacgcacccatagcactgactccgatcccgtccacggacaaggaactgcgttttaccgataagggtacgcccgatgtgaacgatgtgccctgtgtgtacaatctgaacgaggacatctatcaggtctgcgtatactatggcaagggatggacttatacctgctaccccaatatcgccagtgcgaccggagaactgaagctcggggatcagggcggtaaggtgatcgatttcagcaagctgagcgcagtgcccatcaactgctatgtcgagctttcgaatgctaccgtgaccggcggcatcatcagtcaggcagatttcacagatgtcacgatcgagggcggcacctttgattacctcacctgcgcgggcaattgcaccatttccaatgtagtggcccagagcttcgagtggcatggcggcgaccttgccatttccgacaccgttctgtgcaagctgtctggcaacggcatagagaatgcgcttgccgatggccagaagctcagcaagctgaccgtgcgcaacggcggtgtgactgcggtcaacggcagagacctgcccagttctgtcaataccatctatctggtgggcaatgccagcgcagagcttaccctgaacaccgatgtgttcagcatcaacggtgcagcggccaacagttacaatgaacagacctatgccgagggcagtgtactgcatatcaccagcaacaacgatggcaaggagattctggtaaatcaggctggcgatgccagcaacctcaagcccctgcgcattaccgaagaaggtaagcccgacctgaccgaagtgaccccgcattccgtgaaccaggatggtatgaccggcgatatctatgagggtcttggctggcaataccttgtggtcgaagctggttatagaacgatgtcggtgcttatcctcaccagccccgatggcagcccggtggatctgacctcggataccatcaacccctatcataaggccattgcttccgatcagatcatactgacggatgtgacggttacggacattcaggcaggcgcgcctgttaccgcccagaacgccattattaagggcggcactttccagaaagctgtccacgcggatgaaaacagcagcatcaccggcggcaccttccaggagagcgtcgaagctaatggaaccatcgccaagggcatcttccagaagagcgtccaagcttacggtgagatcaccgatggtcagttcgacgcggatgtcactttgggctatagcggcaccatcaccggcggcaccttccagaagagcgtcgaagcttacggcgagatcaccggcggtcagttcggcgcggaggtcactttgggccataacggaaccatcaccggcggcaccttccagcagaatgttaaggctgagggcaccatcaccggcggtcagttcaacgcagctgtccagttggatagtggtaacgcccagatccttggcggcgtgttcaacaatatcaagctgcccgactattatacatcggaaggaacggtcatccgaaatgccgtgatcaccggcagcctgatggcggatacttccagcaaggccgctgtttccaatacggtgagctttagccccatcgaaagtcagcaccgtgctaatggtcagcagctgagcaagctgatcgttgcagacgacggcacggtggaaagcgtaaacggcgtgacgaaggagaccaaggagctttaccgtatcggcgatgtcgagatgactatcaccttcagcaagccggtcgagaacatcaacggtgctgatgtccgcgattataccggcgcacagctttccgaagacggcctgaccctgaccctgaccaccttgaatgacggcgcgcccattgtggtgaaccagagcgaaggaaagctgcccttctcttccctgaccgagggagactttatcattgatgaaacgccggagggtggtacaaaggttcgcagctgtaaggaaggcgtgggcgagctgagccttgtctatgtgcgcacctacgatgataaggagtttgacagcatcccctatggcgagccggacaactatggcatctataaaaagcgcgttgtagctgaagagggcgataaatacacgagcggttcggtcgatatcggcgaaaccgtgatcaagtataccccggctctcactgacttcgaatgggatgtcaagaccggcacggtggactataacggcgagcactatttcggcgaggaactcccgcaggctgaacttcggtactacgacgaaccaaactcttacttctcctctgtgcctaccaaggtgggtacctacgaagttcgccttgtggtgaacggtaacaactactataatagcaatcaggataacgattaccagtatccgttagtcgggcagtacaccgtgaagctgccctttaagaactttaaagcaagggactttaaggctgaacccaacggggacggcacctacacgctgacctgcagaacagcagaaggcgttggtgagctcacgtttgagtataagtgcattaccggcgtaaatgcaggcaagtcactgcccgttaatacgtaccccgtggagggtactccctatggccgctatcaggtggtcatcactgcagaggagggcgaaaaatatcaggctggctttattattgcaggtgaggacgccatccgctacacgcccgtagctgcggactttacctacgatgctgccaagaacaaggcggcctacacaggcacgaactattacgatgccgacccgacgcagatcaccctgctgtacggcacagaccgcagcgagactgtccccaccgcccccggcagctacgatgtgtacgttaaggtggccgaggatgcgaactattacgctactactaccgaaaaggtgggcacttacgttgtgaaggggaccactactcccgacccggtacccacgacctttgcactgacggtcaaaaacgcacaggtcaccatgaagaacggtgatgaagtcgacctgacggctgtgcctgcgggtacagagctcaaggctaccgcaaacccggacaccgagaccagcgtgttcaagaactggactggtctggaactgaccgaggagcagagcaccaagcgtgtgctggagttcaccatgcctgaccacgatgtggaactgacggctaactttggcacaccttctacgaccgatcctgagccgaccccgactcccaccccgactccgactcccgatcccgagcctactcccgatcctgagccgactcccgatcctgagccgactcccgctcccactcccgcacccgcacccagcgatgacggcggcggcgctatcgtgatggtagccgctgtgggtggcgcagccgttggcgtagccgcttacattgcaggcaccgccgcctacctgaagagcgttctgcccgagggtgtggcgatccccgctaaccgtcagcagctggctgttgcactgtggactgccgcaggcaagcccgctacccagagcacggcactgttcaacgatgtggcagccgatgccgcagagctgcaggccatccgctgggcagtggataccggcctgatgtctgcacaggacggcagcttcaagcccggcagccgcgtaagccgcttggaggtcatccgcacttggaagacctatcagcagcgcggctgagcccgctgacccgtaaccccttataaccccgcagggactgctgcacagcgctgtgcagcagtccctttttgcgttggctggcgttttgcgccgcgatgccgcccggtaaaaggcatttcgagccattattggggatttcgtgcaaaagcactccactttttccgccgccggtggtataatgcagggacagagatgtactctgaaagcacgtcattcccatattttcctatagagacagaaaaccgcccggtaaccgcaagccgggcggttttctgctttttgcgggtgcgtccggctgcttttgcgccgccgggtcgtttcaacgcatttgcgggtcgattcgtgccgaaaatcgtccaaagcgggcaaatcgtggtacactaagcatgacacagaacctcccttcctgataggggctaaaggcatcattacgccccgtcaagcgtgtgaccggagcatcggtcatccgcgtccgtgcccggctgaaaaagccgcgcccggcaaaacataacaattgccatctcccgatcgatcctttccaataagcacagcagagccgcccggcaactaccggacggctctgctgcgttataggggaacgccctcagtcaaagcctgacggctttgccagctctccccgcaagcgtcctcgccctctcaggcgctaacgcgccagctctcccaaagggagagcctctggcgaaaccggtcacttggcacttgagccggaagctttaccgccatgccaaggcctctccctttgggagaggtggatgcgaacgtagtgagcagacggagagggcgaggttgcttctccgcagcgccgccgcttccgcaggaagcaggcgctgcaaatgccgcttgccattacgaccccacccgtgaaaatgggatagcggagcgtccgcagaacttgtcggggcaaagcccctccatctgctaacgcagaccgctctgccgcttaaaagccccactggggctttcattgctacgctgcgctccacaaacgcggtcactccgctatcccgaaaattaaaagatattttccgctgaatatgcccaaagcaacgcggagggcattttcaatcgttctccaccccgggacacccggcggtgcgccatgcggcgcacagcacctctttttccgccttggaaagctttttcagggcggcttcccgccgcaaagcggcgctcctgtccgcgcagcgctccagataggcaaaccctactgcgccgtgggcgcgggtgtagcgtgcccctttgccgctctggtgcgctttcagccgggcggcggggtggttcgtccaaccggtgtacagctgcccgccggtgcagcgcaccatgtagacgtaggcggcgtcaggcaaggcggccattgttcttcagcacctgacggcaggcggcaagggcggtctccttgtccttggcggtgatcaggaagcggctggcgtggcagaagctgatgcccgggatgccgcttttctgctcgatgacctcctgcggctgacccgcccacgactgcgggaacggcagcttggactttttggtcttgtggtcggtgacgcactgggcactccacccgccgcgctggctggggtacaccacaaacagggcgtcggtcttgtacaagccgtttttccacggcagatagcagggcagcaccacgatgccgtcgcgggagctgcggtaggcctgctgcactttttcgtccgcacggttcacggcgttggcgctgtcgatctggttttccagtatctgctttgccacggccaccgccttgaaaaagcagctgtcctgatcttctttggagtcccacaccgggttaaaaaagccgatggcatcgcacaggctgttctgctcgccggtgttgtcgttcaggtccagcggctggataaagttttcgtcaatgagccgcgcctgccgctcgcccacaaggccgggacccagcacccgccacagcaggccaaaggccgcgtagggcacgccgttggcgcggtactcccggggctcctgatggtggtcgaacatcccaaagccgatatcatacacgatgccgtcaaaatcatcaggcacggtaaagccccgggtgatcttgatatccgggcgcaggatctgcagcagcgccgtagcaaacacgtcatcggcatggaacttgccggcgtgggtaaaaccgtttgcgggaattttcatggacttgatacctcgttcttctagtttcatctggtatcagtatagcacaatcccgcccgtgggacaacaaaaaggaacggcagcaccgccgttccttttgcgcgggatgatttggaatgcgctccgctgcgctctgcgcatcaatagcggaagaattatttttatttcgggatagcggagcgtctgcggacgctccgctatcccattttcacgagaggggacgcagcggaaaactgcatttaatattctttctctgtgaaaaaggggttcaggaaagtccgcgtttgcgcagcaatgaaagccccagtggggcttttaagcggcagagcggtctgcgttagcagatggaggggctttgccccgacaagctccgcagactttcctgaaccccgaaattaaaagatattttccgctgaatatgcgcagagcaacgcggagcgcattttcaatcatttggcatttgcgttacagcgccgagtagccgaagctgttcaccagcgcgtcaatgtgctgcccggctttgcacagggggcagtcgcgggagtcgaagctggcgtaatccggcagacaggtggggtcaaagatggaggtgaccgggtagcccaagcactcgtgggtggtggcaaaaatagccgaaagccctgccacgatgccgccgtagtagttcacggcttccacggctgcctgaatggtgtagccggtggtgatggatgccgcaaggatgagcacgtgcttgcccttgaccatgggggcgagattatcccgcagaatgatctggctgccggaagtgtactccggcgtgacgatatagatggtcttgtgggcgttcatattggtaaagccgtccttggtcagctcgttggcaaggcaggtgccgatgacctgtgtgccgtccagacagagcacggtatccacgatggtgctgtgctggtaagcgctgaccagctcctttgccacggcctttgcctcggaaaggcgggtcttttgggtggtcacgtcgatgtaatagttgatgtggctgtggctggtggcaaaatgtcccttggccacccgcaggaacagttcgcttttgctggtgggaagcttgaccatgttgatcattgtacagcactccttttttcaccgggcgcagctgcgccgcaaaatacaaaacagcgcggcagcgttccggctgctgcgcttatttttcttctctgcttctttattgtactgaaaaatgccgctgtgcacaagacacaaacctgacgaaaaaccttgcttttttacagacatatcgccgaaaacttggatgcaaaaagaccgccgcgcaaaaagcgcagcggtctttggtaaaagcgcagcgattatgtatctgctcagccgttgcccttcttggcggcctcggccagagccttgtcgtacacttccttggtgatctcccaagtcatggagtactcagagttctcgcggatgggcatatacttgaacaccacagtgtagccgtcctgcaggtcgggcaccttggcggcttcaagatggagcgtgatgggcgtctttttcacgatcaggctgttctcggcgtccgtgatcttcacgccgccgttgtttccgctgaagtagacctgcttgccctcggcgtccttgatggcaagagagaagcggtagggatccagcgggatggggtttgcgcggccagactcgatgtcgacttccatcgtgcaggtgccgttttcgatcttcaaaccccgcagaccgccgatcacctgcagctcgctggtgatcgcacttggcagcgctttgcttaccgggttgttgggatcctgatactcacagccgcccagcagactggcaccggccacagccactgcggtggctgccgaatacttcaggaatgcgcggcgggaaaatgtataagacatagcttgttcctccgttttttaccagtatgttggggctcaggtcgcagacttcaaggcgtctgcggtcagctcccagttggcgctgaactcgctgtattccagatcgggatagaaggtaaaggtcaccgggccgtccgtcagcgcgttcagaccctttgcggtcacataataagtaacggtctcgcccttcttgacctgatggctcagcgcatcaggagaagtcacctgcagcttatcgttctggtaggccagatacccgtctgcctttacggcaaagtttgccttggttacttccagtgcgttattgcggccgttggtcaccaccagcttaaaggtggtattggaagcggcatcgcactccacctgctccagcttggatacgactttcagcaccctgttgctggtgccgacggcgcgctgcaccggggcatcgccgccgcagccggtcagcagactgctgccagccacaactacagcggtaagtgcggtatatttcaggaaagagcggcgggaaaattccccagtcatattcgttcctccttcagaacacatcaatacagattctgccataaggcactacctatacaataggcgaaacagagaaaaatgtcaatgattttccgcaaaacaaatgtgaagattttgtggcagcatcgtacattttagacgaagcttaagcggattttttggcaattgtgtcagctgcggatcacatcggaagcgttcatgacaaaggtcaggctcttgccctccaggaaggtgggcacgtaggtgaccttcagctgcttccagtccttgggcaccatgatcatcagcacgatgtaggcgctgccctgcgggggcaggctctctgtatcggaaaagctctgggaattggcgttgtacagcgagatattggcgcagcaggctgcgggctggccatcgcagacggcggtaaagtccggggtggcagcggccatggcctgaaagtttgcgtccacattctccagcgggggcacggggtaggcctcgttgatggcgtcaatgccctgtgcgccgatggcgtagctctcggtcttgctgcggttgacggtggtcacccgcacgcccagatactcgtagcccgccggctgcacggggtcctgtgtcaggtggaacacgctggtcagctgcacgcccagaccgttccagctgcggacggtatcgccgaccttgacctctaccacggtgtcatcgccgttggactggcagccgcccagcaggctggctgcacccagtgcggcagcggatacgccggtgcacttgaggaagctgcggcgggaaataacagtagacataggtttatatcctccttgaagggtcagtttctaattcttcttcctctggttataccgtttccggcacacagatgcaagagcccgtgtcgattatttacaacaatttcacaagcggggtcactcctgcggcgaaagccccttgacgtgggtctcgctggttttgaccagatttaacaggctgggcgtgtacagcggaaattcccgggtcaggctctcggtggtcatggcaaggcaggcgggatccttgacgccttcgccgccgtttacgtcctgcccgtccagcagcgcttccacattggactctgccatccgcatcacagcgtcggaatagccgtgccagcggcggggctcgatgctgaacatactggaggcgttgtgcggctctgcagagtagagcagccggaacatcttggcaaccgccatcatcaggtaagcgctcacctccgtggtcagtgccttgctgtggcactggccgatcttggcgtagagcacgttcaggctgttggagatgagttttttgttcatagtgggcaaaacgctgccgtggtagacgttgtccttcatcttttcggggttgggcagatcctcggcagagagcatcatgccgttgcgctcggcgctgcggcccagcaggtagtcgcaggaaacattataataatctgccacccgcaccacaaagtccaagccgcactcgcggatgcctttttcgtagtgggacagcagcgcctgagagacccccagatcctctgccgcctgcttttgggtgatgccgcgctccttgcgcagcagcttgatgatacgattgaactccatggtgtgctctcctcaatatccgaagggattttttggtgatatccttgtttttggtttacaacaggttgattatacacattggaaaacgacttgtaaagcaagaaaaatgccgatatttttcgtcttttttcgtcattattgtcaaaagtcttgccggggaccccacatctatgctaaactatgggtattaacacatagattttgtgtttccgacacggcagaaaaacgacagccgtggtgaaagcccgtcttttctgaaacaaaattttttcaaacaggtggttccatctttctgcagtttgtgctataatctctttttggcgactgttcttgaccggcgcacaaattggcgaagggcaaggcagacgctataaaaggtaatataccaagaataagaaagaggaaactttagtatgaaactcgagcgcaaagtccgtctgtgcagcgctgccgctgctgtcctgatcgccgccatcgccctgaccggctgcggcggctccaagtccactgcttcttccgcagccgcttcttccgtggctgcttccaccgctgctgccaccaacaacagctgcggcgagggcgtgacctgggcactggctgacggcaccctgaccatcagcggcaccggccgtatgaccaacttcaccaaggacgctccggctccctgggctgatcaggccgaccagatcaccaccgttgaggtggagggcaccgttaccagcgtgggtgctaccgctttcaaggactgcactgccctgaccaccgtgaacatcgctgacggcgtggagtacatcgaggccggtgctttcaacggctgcaccgccctgaccgaggtcaacatccccctgagcgtgggctacatcaagaccggcgccttcaaggactgcaacgccctgaccagcgtgaccatccgcgacaactgccgtctggacatgaatgtgttccccgctaccgtggaggtcaactacgccgagggctaagccccatccgtaattttaaacccaaagaggtgtgatccatgaaaaccttcaagcttcatctcatccgccacggcataaccgcgggcaacctgcagggtctgtacatcggcagcggcaccgacctgcccctgtgcgacgagggacgcgcccagctggctgacctgaaggagcggttcgcctacccgcaggtagacaccgtcttttcctccccgctgctgcgtgcggtggagaccgccaacatcctgttccccggggctgcccaccagtttacggtgcacgatctgcgggaagccggctttggcaagtttgagggcagaccggtgaaggagcttgtgcaggacgaggacttcaaaaagtggatcaccccgggttccggctatctgccggagggcgcagagcccaccgagcagttccacgcccgctgcgccgacagccttatgaagctgtttgagtacatgatccgcatggacgttaccgaggccgcctgcgtgacccacggcggcgtgatcatgagtatgctcagccagcgtgccgtgcccacccgccgtcccgagcagtggatggcagacccgggctgcggctacaccgtgcagaccgatgtgcagttgtggatgcgggacaagctggtggaggccatcgacatcgtaccttttggctacgccgacaccctgcagggacaggccgaagccgaggaaaacgaggcttacgaataagaaagggttacagtttcccactgccccttgacagaacgcgcagaatcctttattgttaaagggtagtattgtatcgtatacaggaggaacgctgtcatgtcccaatccctctcccgccggtcattcctgaaatgtgccggttccggtgcggtcagccttgcggctgcgctgcttaccggggtctgtgctgcggcgcagcagccgtgtcttacgggcgagcctgccctgctggacggcaaagctgccgtggagctgctgggctatgccccggcaccggagctgggcggcgtactggtgtacctctcggtggaaaacctttcggcagccagcctgccggtggataccagctatctgcaaagccgcgggctgcgcacccgggagcagctgtacagcatgggcaccggcgtgaccgctgcctgcaacggtcagagcgtgccctgcggcagctttgccgccccgctgtacagcgagaacgcggcggatgcttcggtgttcaccctgaaccttgccgccggacgcggtgcgctgctgcactgtttctgcgccgtgccggaggactggcagacccttgagctgacatggcatccggactttgccgccgggcgcagcgccatctttacggtgcgccgtaataccgatgaagccgctctgggccccgtgcccaccacccccgccgaggtcggcagcgtggtggatctgtaacagcataccaaaagagccattgcacaaaatgcgtgcaatggctcttttttgttgagaccctctcagcttaactccctcagtcaaaacctgacggttttgccagctccctcggggagggagcctctggcgcgcccgcaagctttacactttagccggaaactgtaccgctatgccaaaggccccatcctagagggggctgtcgagcgcagcgagactgggggagtttctcccggcgtgcgccttctcaggctcttctgacgtggtcacccggcgcccaccagcgcttcgccggtgctgctttgcaccagcagctcctgcccggtaaggctggaaagcagggcgatgtagctgcgccctgccgggagttccagcggcttgccgttggaatcgtagagggcaagggtgctctgggcgccctgcgtccatgtgatctgccacaggtgcccgccgttcagccagatgccgccgcccatggaaaggtcgtagtccagcgtgcggccgtcgtcccgcagggaggagccgctgtacaggatgagcagattgtcaaaggctgcctgtgtgccggtgttggcatccagctgcggggtgccgtcggcgtgcagcatcccgtaggcggcaagggcgctgtcatagacaaagccggtggctccgccggactggaaattcacggtcacgtttaccgcatcggcggcgtttgcatccggcagatggccggtgtcccgctggggcagcagagcgggcagaacgcctgccgtctcgctctcgctgccggcggcgttctggtttacggcggcagagatgctcagactgtccagcaccgaggaaacggctttgccgctggtgcgccacaggggcgtgctgttccagctgtaaccggtgctgacaaaggcgttgcaccccacctcctgcgcgtccaccgcgcggagattgtagtattccagataccgtttggcgtatgcgctgctgccgcactggatgggcagcacctgctgtccgctgagcagccgccagtataagtcctgcccgcgcgtcaccggccctaccacgggcatggcgctgagggcggggtataccagacacagctcggtagagctgccgctctcggtcagggcttccagcaccaccgaggcgctgccgatgccccactgggtagtgctgccggtggtgttctcgatgaccaccgccgccgcccgctgctccgggtacagcagctgctgcccggtaagcgggtctgccggggcggtgctttctgccggcgcagcggcggtgcccccgcagctgcccagcagcaccgcgcacagcacggctgcaccaaggcgcaggctccatttgcgtttcatgggtctctccccttactgatagttaaagttttgccactcgtcatcgtccacgatggccagataggtcttgccgcggttgaagcagatctcgctgccgtcggcggcatagaccttgagcgggtgctccggggatgccttctgccatgtgccgtgctgcaccgcgccccgggtgaagaaataggcttcgccgccggacacatagtccacctgctgcacgccgccggagtcgccggggtagtccgcgatgcctgcaaaacagaccagcaggttggtaaaaccaagctgctttccggtcagctcgtccacggtgttttcaaaagcaccgtcggcgcggctgtacatggacattttataaaggcgatcccagcggttgtagctgaaggtggtcttgtagctgtccgagtgcacgatgttgatggtcttggcggcggcagcaccggacatcttgttctctgcgccggtgcggtagtccgcaaagcggaagaaggtgctctcgtagggatattccagcccgatgcctgcgttggcggcggcctgccggatctcagcgccggaggtgaactcggtgtgctcatacgccacgttgcggccgcggctgtcgcggtgcgccacatgggggtgagtagtggtattaaaatagctcttgccgccgatgttcaggccggagtagtgatacacgttgatgaacttggtgcagggggcgctttcgccgtcgtggtagtacagcgcctgccacggcatgagcagctgcaaaaactggtcgcggccggagcgcagcgggcccacctccgggatggcgttggcgtcgtggtacaccgcgcagaagcgggagatgccgccctccaccttgctctcaatgagcaggtcagccgagccgatgccgcgctgcgggcgagcgttctgccgctgggtgttgctgatgttgttcaccatcacgccgacaatacggccgttgctgcggcgcggctcgccggtaagggggtcggcgttataggcgggcaggctgctgtcggcgctctctgccggggcttcggatgccgctcctgcgtccggggctgcggcttcggtgctttcagaggatgcagagctgcccttcccgaaggtctgctgcagccagccggaaaagccgttgcccacacaggcgctgccggcaggcgcgcagccggacagagccagcgaggcggctgccagccccgagacacggagaacggtacgacgcgtgatctttttcatgcaaaaaacctcctgatcaagaaagctctgcgcagccccggcgctgtcggaacggttgcgcgcggtggatgaaaacgaacggcccttcggcactgctttgattgtaatagttcttgcggcgtttgtaaagtgaaaattaacggcaaagcgctttacctgtgctgctctgctaagctctgcagcatctcgtgcagctgggcgcggacggcggcgggggcggtgacctctaccttgccgccaaagccgcacacccagccgaaaaactgctggctgacgcagatgggcacgtcaaagtggaagtgctccgcgtcctccgggcagaacaccggctcgcggccaaagcgctcccgcatgaccggctcaaggtcagcagtgcaccgcagggtgacccggtactcggtgccgccgaacatattaaagtgcttgcgcaggtaggcgggcaggtcgaaggtgcggaagaactccttgccccggcgcggctcgtccagcaccagcaccccggccatccggtccacccggtagtggcgcaccgggggcgctttttcgtcctgataggcaatgaggtaatagcagccgttttcccacgcaagctgccacgggcttacggtgcgcacggcgctgctgcccttgtagcggaactgcaccagacacccccgattgatggcggtgtgcagggcgtcgatgctgtacaaaagagtctggctgtcggtcttgggacgtccgtccacatacacctgacgctgcagctgggtgccctcgtagtcggagcagagggcttccagtttgtggatgatacgcttgctggtgcgcgccgagatgacgctgctggactgtaccgcgtccaccagcagcttcagctccgaaagctcgaatgcacggcttgccatccagtacccgccgccgcgcccgcgctgcagctggatgtcgtagcccagactgcgcagggtgtcgatatcgctgtaaatgctcttgcgctcggccagaatgccctgattttccagcagctgcaccagctggggcacgttcaggcggtggttctcgtcggtgcgctgctcaaggatgcgcagcagcgttaccagcttggatttctgtccttcctgcttgggcatggggcaatacctccgtcacggtttattccggcagctttttgtcaaaggcggcgcggcgctgggtggaaaggcggaacatttcttccagcttgtcccggtcgtctgccacaagggcggcgcgcatttcctgcaaagcagaatcgaactggtcgatctcgctgatcaggttctgcttgttccacaaaaacagctctgcccacattttatcgttgatgcgtgcaatgcgggtcagatcccggaaggagtcgccggtgtactcgcacagcgaggtgttgtcgttggcgcacatcaaacttacggcgatggcgtggcacagctggctgacatagccgatcatccggtcgtgctcctgcacggtcagggtgcagatgtgcttgaagcccagcacctcggccagctcctttgcccactggatgcccgcaggggtgttcttttcggtgggggtgatgatgaagttggccggggcaaaattcacctcggcggcgtgctccacgctggaagtctcgcggccggccatggggtggctggcaatgaactccacccccgccgggcacagcgcctgcaccggctccacaaggccggtcttgacgccggaaacatccgtaaagatgcacccgggcttgagcagggaaccgtaggttcggaaccagtccagcagcgcagtggggtacaggccaaagatgatatggtcggcctgccggacaaggtcctcaaaatcgtgggtcttaccgccggcgatatagccgtgctccagtgcgtactgcaagtgtccttcgctgcggttgatgccgtccacatggaagcctgcgcgggtcagctccagcgcgtacttgccgcccagcagacccagacccactacgagataacgttttgttttatcaagcatcttctacctccacgccaagcggcgctgcatctgcaaaaaagccgggccagctcttctggatggcttcggcatcgtccacggtcaggggcagtgcggcagcagcagccagcaccgcaaggctcatgaccacccggtggtcgttgtggccgtgcaggggggcggcaggggcgtgcagacgctcagcacagccctgcaccgtgatggtgccgccgtcgctttccagcaccccgccgcaggcgcgcagctcggcttccatagccgcgatgcggtcgctctccttcaggcgcagccgctgggcgttgcggatgacggtggtgccctcgcacagcagacccagcaccatcagcacggggccaaggtcggggcagtccgcaaggtcgatgtccaccccatgcaggggcgcttttgcaaaggtgacgctgtcgcctttgcgggtgaacaccgcgccgcaccggcgcaggatgtccagaatggcggcatcgccctgcaaagtgtccggcgcaaggccggtgatggtcaccccgccgcacaccgcgcccagcaccgccggaaacgcggcctgactgtaatcgccctccacgttgtagtcgcaggggcggtactgctgcccgccgggcagcagcagggtggtttcgtccagccagcggctgtgcaccccaaaagcggcctgcacggcgcgggtcatgtcgatgtagctgcggctctccaccgggggaataaggtgcagctggctgtccccgggcagcaagggcagcgcgaacagcagcccgctgatgaactggctggacacgttgcccgccagccggtagtccccgggggtcagtgcgccctccacggtcagcccggcgggagattgctcaaaccgtagatgctgctcgcgatataacgtttcgtatacggactgcgggcgctccatcagccgtccgcgtccggtaaaggtgaccggctggccggtcaggctggcgatggggatcaaaaaccgcagggtgctgccgctttcgcagcagtccaccggggcggtcaggggcagaaaatgcccaagcccctgcacagtagcatcgtctgcgccggtgtccacggcggcgcacagctgcgcggcagcggacagggtggcagagatgtccttgctgaattccagatgggtgatgtgggagcgtcccacagccagcgcggcgcacagcacggcgcggtgcgccatgcttttgctgggcggcgcggcgatcacgcccccgatgccgccgggggcaggtctgatggttactagcatagcggtgttatccttttgcaatttcccccgggcagcgcttcaggcgcccccttgggggagctggcgcgccagcgcctgagggggtaaacggtttacatctcccggccgatggcccaagccacctgacggcacttggccatggcctgtgcaaaggcgtccggggtcaggcactgtgcgccgtcgctccatgcgtgctgggggtcgtagtgcacctctacctccagaccgtccgcaccggcagccacggcggcgatcatcatcggctctaccagattggccttgccggtggcgtggctgggatctaccacgatgggcagatgggtcttttcgtggatgatgggcacggcggaaagatccagcgtgttgcgggtgtatttttcaaaggtgcggatgccgcgctcgcagaagatgacctgctcgttgccgcctgccatgatgtactcggcgctcatgatccactcctcgatggtgttgcacaggccgcgcttgagcagtaccggcttgtgcatcttgcccaccgccttgagcagctggaagttctgcatattgcgtgcgccgatctgcaccacgtccacatactcctcaaactccgggatgcggtcctcgctcatcagctcggagacgatgggcagaccggtggcttcgcgggcctttaccatgtccaggatgccctcggtctccagaccctgaaaggcgtagggggaggtgcggggcttgtaggcgccgccgcggaacagcgctgcgccgcccgccttgactccctgcgcgatgcgcagggcctgctcggcgttctcgatgctgcaggggcctgccatgacggcgatcttttccttgctgccgatcttcacgccgccgcagtcgatgaccgagtctgcggggtgaaacaggcggttggcgcgcttatagggcgcggacacgcgggtaacgttgtcgatccacgggtttgccagcacgtcccgctcgtcgatcttggtggtgtcgcccaccagaccgaacacgttgtagtccttgccggtgatcagggtcacatccagaccctgcttttcgaatttgtcaacgatcttttccagctcctctttgggagtgccttttttggtggagatgatcatgggaggttattcctttcctgtttgttttacatcacgatatgcgccttactggagccgtcggtgcgcagcagctgcgccagccagatgcaggcgtgcaggtagccctgcgggccttccccgataaaatgtccctgacagccaaaggacaccacgtccgtcttgcggaagggctcgcgctcgtccggggcgtccagcatcacctctacggcgggcacgctgcacagccgcagtgcgtccagaatggccacgctgtaatgggcgtagccgcccgggttcagcacgataccgtctacccgcccgggggcagactggatctcgtcgatcaaatcgccctcgtggttggactggcagatatccgtttcaatgccaagctggtcgcagcccgcctgcacatagtccatcaggccggtgtagtccacttcgccgggcacgccgggctcagaccagcgcgccagattgatgttgggcccgttaagaatcaaaaatttcatccagtgcctcctgtgcagctgccagcgtctgggccagcgtgccggtgttagaaatcaccgcatctgcggcggcaaggtacagcgggcggcgctgggcttccatggtgcgcagcgcttcggcgctggaagaaagcgggcggtcgccgcccacagccagcgcttccaccggacggtcgatgaacagcactacgccgttctggcgcagggcgcggatgttttccgcccgtttcaccgcgccgccgccgcaggagagcacaagccccttttccttgccgaagcgggcgatctgcgcggcttcctttgcgcggaagccctcttcgccctcggcggcaaagatatccgggatgctgcgcccgtctgccttgacgatctcttcgtccagatccacaaggggtctgcccagctgctttgccagcaggcggccaagggtggatttgccgcaggagggcattcccacaagggcgatgttcagcgtctcgcggcgcagcgcggcggtgatgcgccgcacctcgcccggggcgtcctcgaacttgcggccaaggaagtattcggcggcatacaccgcctgtgccaccagcatctccagcccgcctacggccaccggcacaccggcgtcctcggcgcggagaatgagttcggtcttgttggggttatagaccacgtccaccacggcttccagcccgggcatggcggctacgtccagactgcacacgcccacgttggggtacatcccggcgggggtggtgttgaacaccacctgtgcaccgctgcgcacggcttcggcgtagctcagctcgcccttttccgggtcgggagtgcggctgaccgtcagcacttttgccgcgcccttgtccagcgccaccgcgcgggtggtgttgtgggtgccgccggtgcctaagatgagcacggtcttgcccgcaagctccacgccgtgggcttcgcacaggtgggcaaagcccagataatcggtgttgtagccgtagagcaggccgtttttattcaccaccgtgttcaccgcgccgatggcgcgggcgcgggggtcgataaaggagcagtactccatcaccagttttttataggggatggtcacattgatggccttgaactgccgccgctgcaaaaaggcgcgggcgtctgcctcggtgggcagggggcacagctcgtagctgtacccgcagagcagctcatggatggtcttggagtaggagtgtcccagcttgccgccgatgagtccgtattccatctcagtcctccttccggtagccggtggggtcggtcatccaccgggcaccgtaccgggcggtgagcagatcgcccaccgcaagggcggcggcgcaggtctgcacaatagcggcccggggcacgatgcaggggtcgtgccgtccctgaatggacagttgtgcgtcctttttggcgatatagtccaccgtgtcctgctgcttgtagatgctgggggtgggcttgacggcggtgcggaacaccaccggcattccgttggcgataccgccgttgatgcccgcgttgtggttggtggcggtgaccaccgcgccctctgccgtcatgcggaaagcgtcgtttgcttccgagccgcgcagcccggcaaagccgaagccagtgccgaactcaatgcccttgaccgccgggatggaaaaggccaagtgggcgatctcgctttccacgctgtcaaagtagggctcgccgatgccggcgggcaggccgaggatggcagtttccagcacgccgcccacgctgtcgccctcggcaccggcggcacggatggcagttttcatgggctcttccacggcggcgtccagcaccgcaaagccctcggtcttactggcaagcgtctccgcctgtgccgcaagggcggcggggtcgtccagcgcaaagggcgtatcggcaatatctgcgcaccgggcaatgtgggtggtgatatcaatgcccgcccgctgcaatgcggcaagcacgatgctgccgcctgccacaagggcggcggtcacccggccggaaaagtgcccgccgccccgggcatcctgaaagccgtggtacttggcgtaggcggtaaagtccgcgtggccggggcgcagcaggtcggcggtcttggcgtagtcgccgctgcgggtgttctggttttcgatcatcagggcgatggcggtgccggtggtgtggccgtttaccacaccggacagcagctgcaccgcgtccgcttccacccggggggtggaaaggccgtcgccccgggcacggcgcttatccatgcaggcggcgagaaagctctcgtccaccggcacaccggcggccatgccgtccagcactgcgcccacggcgcggccgtggctctcgccgaagatggtcagcgaaaggtcgctgccaaaggtgtttttcatgggtcagtcctccatgcccagcagcgggcgcagcccctccacagggatggtctcggcgcgccagcagccaaggccgggcaccttgatgatggtgatctgcccaccctgcgcttttttgtcgtgcagcatctcggccagcaccttttccttatcgtaggcggtgcgggtgggtaaccctaagcggcggtacacgccgcgcacccgcttttgcagcgccttggattcgatcatgggcagcatacccagcgccacgcactcgccgtggaacaggccggtggtgcggcgtcccttgatgcccttcacggcttcgatgccgtggccgatggtgtggccgaagttcagcgccttgcgcatcccctgctcggtctcgtcctgctccacgatgctctttttaaagcgcaggctgcggcagatgatctcgccgatgcggtcgtccacgtcctctttttcaaagatggagaacagctccgggtcagccaagagacctgccttgacggcctcggccagaccgttgatgaagtggcggcggggcagggtggacagggtgtccgggtccacgatgaccagctttggctgccagaaagcacctacgatgtttttggtgtcgccaagatccacggcggtcttgccgccgatggaggaatcgatcatggaaagggtggtagtggggcagttgataaaatcaatgccgcgcatatagatggaagcggcaaacccggcaaggtcgcccaccacgccgccgcccacggctaccacaaggtcgccgcgccccatgccgaagtccagcatctgccgcagcacggtctccagaattttaaagctcttgctggcttcgccctgcggcacggtgatgatggtggcgtccttgcactggtcggctaccatctgtgcgtactgtgcgggcacaccgctgtcggtgaccaccgccacccggcggtccagccgggcgaactggtacaggttttccagcgagccgcgcttaacgatgatgtcgtagctgcgctcacccagattcatggtcagcttggttccgataaaatcactcattttgtatacactcctaacagccgcaccgtccggcaggtgcggtcaagctcgcgcagcagcgcggcggtctcgccggcggcggcatcgcccaccagctctacgtaaaaataatattcaaaggggacgtgcggcatggggcggctcttgatggactccatattgaagccgctggcgccgatgacctgaatcacctccgccagcttgccgggcttgttatccaccgtgaaaagcagcgagaaccggttgcccgccgtgggcttttcgcggctgagcacgatgaaccgggtggtgttgtcgccgtcggtgttgatgttgggcaccagaatttccagcccgtacagggcggcagtctcggcgctggcaatggcggcctttgtcgcatcgccgctttctgccacgaactttgcggccatggcggtgtttgccatggcggtggcgggcagacggaactgctttaaaaaggtctcgctctgggcaatggcctgctggtggctgtacaccgtgcgcagctgggaaagctgggtgcccggcagcaccagaaggttctgggagatgggcaggtcgtacacgtccaccacccacagttccgggtggttataacacaggtccagcacggcggaaacgtccccggcgtggctgttttcaaagggtactacgccgtgagcggcttcgcccgcggcaacggcctcgaatacctcgtcccatgtggcgtaactcacggcttcggcgtgggggaacagcgccttgagggcgatgtgggcaaatgcaccctccaccccctgataggcggcgcggttacgtcccagcacggcggcttcgtactgcttggcaagatccatcatgtgctggacatggtctttatagtaagggcgcagcgcgggctgctgaatgcgggctgcggccttttccagcacggcggcctcccgggcggcatcgtagatgggcaggccgtgcgcccgcttatattcggccacctgtaaaacagcagccatccggcgctcgaacagcgcagccagctgcgcatccaccgtgtcgatctcggcacgggcttgttccagtgcgtccatgggggtcacatcctttttggtcggtttttgcggggatacctagtaagtataccataaccgggacagagaaacaacaaaccaccctccatttgagggtggagaaaatttcaaatcagctatgggtaaaaagacgaaaatagaaaacagaaacgcacccacagtccgtttttgtgccctgaaaagcagggaaaacgaacggtgggtgcgttgaaacagaactccctcagtcaaaacctgacggttttgccagctccctctgggagggagcctctggcgagaaggcaaactttacctctatgccaaaggccccatctccgaggacgacttcccccggccgggggaagatgtcgcgtagcgacaaaaaggggaatctggcatcgcgcagcgatgactgggggagttcaactatttgtttttcaaaatatcctcccagctgcgggctttgccgtagtagcgcccgtaggggttatcaaggtctgcggcacggggactgggcggcgcgggcggctggggcttgggggtgcggtcaaaggtgatgtgcacggcagcgccgccggctttgatgcggaagcgcatctttagtgcccctccccggcggtggagaccgccccggcggtcaggcttgcccaaaggggctcgctgttttccagcagggaagcggattccttcagccatgcgccccggatgccgatataataatctgccagcagctgctggctgtcgccgctggcgctctgcaccgcgtccgaggtgtagctgcccagctccatcccggtcagcaccgggcaatccgtccagcggtagaccatgttccaccagtcgctgtcggcatcggacttgggcagatgaccgtccagataccgcaacgtgccggtggtctgctggaagccagcggggtcatacaggataaagatggagctgagggagctttggatatcggtggaaagcttggtggtgcccgccatatccagataagcgtccgagtcctcgctgttgaaagccatggtgtattggttcagcttcaccaccaccttgccgtcgccgttgcagtcctcgccataggcggcaagctgctgttgcagggcggtgacggtggcttcgggcaggtagtaggggctgaccaccgcaatgttgtaatccgggtgggtggtcaggaaatactgcccgataaagcagtacgccacgaacgcaccggcaatgccgaagatgagcacccatttcagattgtagtcccaccagtttgcccagcgctccttgcggctgtactgccgctccttgcggggcttgaggtccttggggtcaatgtcgcgttcgtaacggtagcttgccataaaatagttctcctgtgtgatacggtcgggcagcagtgtaaagccggttcccaaagccttcaccccttggggggaaggtggcgcgcagcgccggatgaggggtaattccggcagcagcgccctcatcagtcacctgcggtgacagcttcccccgaccgggggaagcctttgagcagaacggcgattaaaaggctgttacttcagtgcagccagaatactctggcgcacggcgtcgggcagctgtttctgctcggccttgctcatgccggcggtctggatggggggcatgatcttgatgcgcacactgcccgggcggcagcggttgccattgctctcaaacagggcgcgtgcaccggtcacagccaccggcaccaccggggcacttgtcttgaccgcaatgcggaaagcgccggccttgaactcgcccgcgccgccctcttcgcccttgtagcgggtgccctcggggaagatgacgaagctgcggccgccctccacgatggcggtggcatcgttcagcgctcgcaccgaggcacgcacatcgtcacgctgcacgaacacgcagcccagcagcttcatccagcggttgagcaggggaatcttttccagctcctccttggcaaggatgccgtggggcttttccagccctgccagcagcaaagggatgtcgtagtagctgcggtggttcgccacaaacacgcagggacggtctttggggatgttctccagcccttccaccaacagggacacaccggtcacctttaaaatgccccggctccagcgggggatatgctggttcacgatctgctccacggtggcggtatctccggcggctgcggcgcgctcggcgcggcgcaggatgccgtagtgcaggatcatgtaaccaaacagataaataaacatcgcaatggtgcgaagaatgctcataatagtttcctcctattgcaaaaaatgccattgtcattgtagcacactttgcacaaaaaagggagagataaatatttttttacaattagccccggttgtatcttgcaaagttgacaaaatacaggtatatttatatctgtaaagccagcacaatggcactttccagacaaaacgcctgcggtgccggttaaaaacgtaagagaggtaccgcagttactatgggtctttttccttctgccaatgatttcaaggccgggaagggtgtcgaaaaggacgccccccgcaagaccggcatcggccgcttttttgagcttgtaggccgtgatatgaacgggatgttccttgcaaacctgctgacctgcatcgggtttgcaccggtcatctgtctggtgtacatcggctttttgcagaacagcctgccggtgatgctgggcagcgccgccgtaggcggtctgctggcgggcccggcactggcaggaatgtacgataccgtcctgcgcgcactgcgcgacgaggcgggctattggtgggtgacctaccgcaaggcgttcaagcgcaactttaaagccagccttgcgccgggtgtgctgtacaccgtggtggtcacgctgcagatcttcctcgtctatttctgcttcaatatgctgtaccacggtaccaacgtgggcatcccgctgtgggtggctacggtgctcaatctggtgctgttccagatgctgtttgcctatatgtggccgcaggtggtgctgctggatcagccgttgagcctgactttgaaaaacagcatcaactgcatgatcgcctttctgccccacgcactggctgccgccatcgtgcaggtgctgttctggggcgtggtgatcctgtgtatgccgctggggcttttcctgatgctgatcttcggtttctggttcgtcaccgaggtgtcctgccagatcgtgtacggtgatatcgaccgggtgttccacatcgaggagaacatccgcaaaatgaaggacgccgagctggaagcagccctgaaagaggactacgccgacgacgaccccccggaagaataagcgataaaactgcggaaaggagcgatgtcccatggaacaacggaataatcttgtgctgcaggggacagagaccttttcccgcgggcagctggacaaccttgcgctggaaaacggcgcactggtgctggacagcgtggcagggcgcagccttttgtacggcagctacaccaccccggagtttgccatgccggccttctgcaacctgaacgtcagctggaacgcccacgcaccccgggacaccatggtggaggtgcgctgccgggtatatgcggcaggggcgtggacgggctggatgagctttggcaagtgggcaccggattatccccggtgcagcgtgtccagccacagcgaggacggcatgatctttttgatgggcgataccgtcacggtagctgccccgggcggcggcaccggcgtgcagctgcaggtgaacctttccaccaacaacgataaagttagcccggcggtgcgtctgctggcggcggcggtgcgcccccttgcgtgggaaaagcacaacggccacccgctgaaccggcggctctatctgccggaatactgcctttctgcccacgaccccagctttgggcgggagatggatctgccgctggtcatggcggcgctgatgaaccgctggggcgaggatattctgccggaggaagtggcctacgccatggaggacggcagcacccgctctaccggcaacaccgcctttgctgccgccgccgcaggctgctgcggctacccctgctggcaggcgtggatggaccttgccgacctgcgggagcagatccacgacggctgctcggtggcggtgcaggtggagcggcgggtgcgcggtcagcgcgacccgacgcggctgtggatggggctgcgcggttttggccacgatgacgccgtgatggcagactttgtgctgctgaacgatcccaccgccgatactgacggcgcagtgaactgcaccatggcgctggtggattttatgcgttactttaccggcaaggccattgccctgcggccaaagcagcgggaggctgaggccgaccgtccccggcggctgcgctgcgagctgcacgccggcacccagccgggcacttactactttgagcggaggggagagcccgcagacttgccggaggatttttccggttggatcgcctgcgcgccccacgacggcgtggcgcacgccaccaccgcccaccgcacctttttgcgctgtacccgcaccgaggacggcggggtacagttcccgccggagctgctggccgcaggcgggcgctgcagtgtgtacgcagtggaccagaccggcaccatgcgggtagcagaggtacggctgccgaagccgaagcccgcgcccgcgagcacagaaccccaagccagcggccagaccggggacgccccggcacagccgtaagcttttttcagggcgatatatgaaacaggaggaacacattatggcaaagacgatcatcactttgggccgtgagtactgcaccggcgggcgctacatcgcagaggacgtggcaaatgcgctgggcgtcaagctttacgacaaggagctgatcaccatggcagcaaagaactccggcttgtcggaggaggctgttgccgccagcgagaaacggcatacccacagcctgctgtacagcctgtacaccatgggcaacgagctgccgctgggcgatcaggtgttcattctgcagagccgtatcatcaagcagctggccgaggaaggcccctgcgtgatccttggccgctgcggtgactacgttctgcgggaacgcaaggacgtgctgcgggtgttcgtgtatgcacccaaggagtggcgtttgcagtacgccaagaccaaccccctggtaaaggccaaggacgaaaagggcatcaaggacgaggtggaaaagaccgaccgcaaccgctcggcctactacaactactacacccagaaccgctggggcgatgcccacaactacgatctggccatcaacgccgcccttggccgcgagacctgcgtgaagatgatcttagacgcagccgccgcaaaggaaaagacgctgtgacccccggcaagacccaataaacaacgacagaacgtgggcagggcgcttctgcgccctgcccatgtttccggcaaggagaaatcgtgaaaacaaatcaatcgcagaccgcacccgccgaggtgcgggaaaacatcatgggcaccatggagatcaacccgcttttgctgaagctcagcatcccgatgatgatctccatgctggtgcaggcgctgtataatgtggtggactcggtgttcgtgtcccatgtcagtgagagcgcccttaccgccgtatcgctggcgttttcgctgcagaatgtcatgatcgccgtaggcgtgggcaccggcgtgggcgtgaacgccctgctgagcaagagccttggcgaaaagaaccagagccgcgccaacgccaccgcagaaaacggcatcttcctttctctgtgcagctttgcggtgttttttgtcatcggccttacctgcatgaaaccctacttctacgcccagaccagtgaccccgtcatcgcgcagcagggcatccagtacctgtcggtgtgctgcatcttcagtctgggcattttcacccagaccatgggcgaaaagctgctggccgccaccggccgcacccagctgagcatgatcagtcagctggtgggtgctgtggtcaacatcattctggaccccatcttcatcttcggctactgcgggcaggcgctgtccggcaccaccggcgcggcggtggctacggtcatcggccagttctgcggcgcaggcatgaccttgtacttcaacacccgcaaaaacccggacatccagatcagcttcaagggcttccggcccagcgccaaggccatcggccgcatctacaccgtgggtctgcccagcatcgccatgcagtgcgtgggcagcctgatgacctttggcatgaacctgatcctgatggccttctccgctacggcggtggcggtgttcggcgtctacttcaagctgcaaagctttgtgttcatgcccatcttcggcctgaacaacggcatggtgcccatcatcagctacaactacggtgcccgcagaccggaccgcgtgaaaaagaccatcaagctggcggtgttctacgccgagctggtcatgttcatcggcttctgcgtgttccagttcgcgccagggctggtgttgagcatctttgccgccagcgatgccatgctggtcatcggcatcccggctatgcgcatcatctgcctgcatttcctgctgacgggcgtcagcatcgtgctcagctcggtgtttcaggcgctgggcaacggcgttttcagcctgatcgtttcggtctgccgtcagctgttcgtgctgctgccggcggcgtggctgctggcacagaccggcagcgtcaacaatgtctggtgggccttcctcatttcggaagtcgtcagcttcctgatgagcctggccttctacgcccgtatcaacaagaccaccatcgcacccctgtaccattgacccgggtgcgggcagcggccctgcaaacgaaaggaacgtgatctctatggtaaaaaagctgaagtggaacctgatcctcatgagcctgctgtatgtcgggctgggcatttttctggtcatgaagcccggcacggcgctgaacatcgtctgctatgcgctgggcggcgtggtgctggcctgcgcagcggtgcagctgatccgctactttgtggtggagcgcggggtgttccagagccagcttaccctgatctccggccttgtctgccttgcactgggcgtttttctgctgctgcgcagcgatatcgtggtaagcattttgcccatcgtgttcggcctgtttgtcatctttgacgccatcggccgggtgcagaacgccttggacctgcgccgctgcggctacgacagctggaagggctttctgctgctgccggtgctcagcgtggtgctgggcgtggtgctgatcttgaaccccttcggcgctatggaaacgctggtgatggccatcggcgtcatcctgatcgtggaaggtgccatcaacctgctcagcgctctgtacaccgtgctggctgtgcgccgctttgcaaagctgcacccggagacccagtccgtgctggaaagcatcaccggcgaggatctgaacggcgacggcgttgtcgccccggatgtggcccatgctgacgcggaagccaccgccgtggaactggatcatgtggacgagagcgccaccgtggaacaggaggagcgggagtaaagggaaacgacctcgccctctccgtcacctacggtgacacactcccccttttgtcgctgcgcgacatcttcccccggcgcgggggaagtctttcctcaaagggagaggccttggcaaagagatgaagtttgcgtggactgccaagggctcccactttgggggagctggcaaagccgacaggctttgactgagagggcgagcacgttgcccaaaagcataaacaagcaaatctataacaggaaaaggaacaaaatcatggaaaagtacgatctgatcattgtgggtgcgggccctgccggcatctttaccgctgtggagctgctgcgccacggcagcaaaaagaagatgctgctggtggaaaagggcaagccggtggaaaagcgccactgccccaaggcagaggtaggccactgcgtcaactgccgccccacctgcgccatcaccaccggcttttccggtgcgggtgcgttctcggacggcaagctgagcctgtcttatgaggtgggcggcgatctgcccaccctcatcggggaggagtttgcgcaggaactcatcgactacaccgataagatctatctggagttcggtgccgacccccatgtggagggcatctacaccggcgaggacatcaaggagatccgcaaaaacgccatccacgcgggtctgaagctggtggactgccccatccgtcatctgggcactgagaaggcgcaggagctgtatcttgccatccagaactatctggcagacaacggcgtggagatgcgcttcaataccgagtgcgagaacatcattctggaagaggaaggctgcaagggcgttctgctgaaggacggcgacagcctgctgcccgtgtacgcggacgaggtggtcatcggcaccggacgccgcggcgcagactggctggaaaagctctgcgcagagcaccacatcgcccacaagcccggcaccgtggacatcggcgtgcgtgtggagtgccgcaacgaggtgatggaaaaggtgaacaaggtgctgtatgagtccaagctcatcggctacccgaagccttggaagaacaaggtgcgcaccttctgccagaaccccggcggctttgtggcgcaggagaattacgacaacgaccttgcggtggtcaacggccacagcttcaaggaaaagaagagcccgaacaccaaccttgccattctggtgtcccacaattttaccgagcccttcaaccagcccatcgcctacgcacagaaggtgggcgagctgaccaatatgctgggcgcaggccacatcatggtgcagcgctacggcgatattctggacggcaaacgcacgtggcagaaggagctggcacagtccaacgtgaagcccacgctgaaggacgccgtagccggtgatatcaccgccgccatgccctaccgcgccatgaccaacatcatcgagttcatcaagatgctggatatggtcgtgcccggctttgccgccaacgagacgctgctgtacagcccggagctgaagttctactccaacaaggtgaagatggacgagaaccttgacaccaacattcagggtctgcactgtctgggcgactcctccggctggacgcgtggcctgatgatggcctcggtcatgggcgtgctgatgggccgcaagctggctgaaaaagaaggctgctaaaaataaacgcaagcccggaaggttgcagaccttccgggcttgcgctgttgaggaatgtcacttcagtttgctcaggtagcggtaaatggaggcttccgaggagcccagctgggcggcgacctcgctgactgcatagtccctcaagaacatccaggccattctggcacagcaggagatgacgctggccaatgtggtcaaaactacggtgtttctggcggatatcaacgattttgcagagatgaacaaggtgtacggcgagtattttgcgcagccctaccccgcgcgcagtgcggtgcaggtgggcaagctgcccaaggacgctccgctggagatcgagtgcattgctgtaaagtaagttcccccgcacgggaagaaaagaaacggtgaaccaaatggataaacagatgttcgttcgcatcctgaacagtgagatggagctggctacgggctgtacggagcccggcgcagtcgctctcaccgccgcagaggcgggcgcagcactccgcaaggcaggcggcacacgggtagaagccgtgaccgtccgcgccagcatcaacattatcaaaaacgccatgtcggcgggcattccgggcacctcgtatcagggcatggattacgccgccgccattggtgccgtaggcggcgaccccgtccacctgctggaggtcatgaactatgtgccccgggagcagaaggaagaagccgcagcccttgtcaaggcaggcaaggtcaaggtagaggtggcacaggtgccgcagaagctctacattgaggtgcttgtcacttctgacggtcacaccggccgcgcagtggtgcgcgatctgcacaccaacgtggtgctggtggagcaggacggcgtggctacgctggacaagcagcacaccgactctgccgccgccggggacagcgatgtggtgaccccggagcagatcgcagaatttctgaccgtccgctccatctgggattactgtactgaggagctggatcccctgcatgaccccatcgacatcatccgcagcgccgtgcaggtgaacacgaccatcagcgacgagggtcttgccaaggaatacggccttgccattggccgcaatctggagctgaactgccgcaagggtctgatgacccgcgacctgaccaccaacgccatggtcgctgcttctgccggtgcggacgcccgcatggcaggcgcgccggtctcggtggtggcaaactccggcagcggcaatcagggcatcacggctaccatgcctgtcgtagctactgcccgctggctggacatcgacgaggagaagatgctccgcgccgtgaccctttccaacctgatcgcgatccgcatcaaggccaagtttggccgcctgagcaacctttgcggcgctaccgttgccgctaccggcgcggcctgcggcattgcctatctgctgggcggcggctaccacgaggtatgctgcactatccagaacatggtgggcaacatcaccggcatggtatgcgatggtgcaaaggccgactgcgcactgaagatctccacctgcgtcaacgccgcctgtcaggcagctgccatgggcgtgcgcggcgtgcgggtgcagagcaccgacggcatcgtggagcacaatgtggaatatacactggacaactttgccaccctgagcacccacggcaccagcgacagcgtgatccttgatctgatgctgaacaaacacctcccggagacggaataagtctccccacccggcccctttccggggcaaaaagaaagaggtactaaagttatgaaaaagctattcaatagtctgcccttccggcttctgctgggcatttttgttggtatcatccttggccagctgttcaacgagagcaccatgggcgttgtggtgaccctgcagtacatcatgggtcagctcattaccttctgtgtgccgctgatcatcatcggcttcattgccccgtccattaccaagctgggcaaaaacgcctcccgcctgctggcagtggccatcgtcatcgcgtatgtgtcctctgtctgcgcagccttcatgagcatgggcgccggctacggcctgatccctcacctgtctatcgacaacaacgttgccggtctgcgcgagctgccgggcgtcgtctttgagctgaacattccccagatcatgagcgtcatgagcgctctggtgctgagcgttctggttggtctggctgccacctggaccaacagcaagctgacctgcgactttttggccgagttccagaacatcgtgctggacatcgtgagcaaggtcatcatccccgtgctgcccttctacattgccgccaccttctgcggcctgagctacgagggcaccatcacccatcagctgcccgccttcctgcagatcatcgtcatcgttatggccggtcactacatctggctggctgtgctgtacctgctggcaggtgcttactccggcaagaacccctgggaagtgctgcgtcactacggccccgcttacctgaccgctgtcggtaccatgtccagtgctgctacgctgggtgtggcgctggagtgcgcccgcaagagcaaggtcctgcgtaaggacatggtcagcttcggcatccccctgtttgcaaacatccacctgtgcggctctgtgctgaccgaggtgttcttctgcatgaccgtttccaagatcctgtacggcaagctgcccagcgttggcaccatgatcctgttctgcctgctgctcggcatcttcgctatcggcgcacccggcgtgcccggcggcactgtcatggcttctctgggtctgatcaccggtgttttgatgttcgacaacgccggtacggctctgatgctggccatcttcgccctgcaggacagcttcggcaccgcctgcaacgtgaccggtgacggcgcgctgaccctgatgctgaccggctacgccgagaagcacggcatcgctgataccggcgaccttgaaagcccgatcctgtgataaaaatctgcgcactcctccttaattacaagagactgtgaacagacagtcccaaaatctccgaaaagccccggcgaccgcatggccgccggggctttttgtgctgcaacccggtttgatatccggcgtaatgggatgaaatttttgaaacgcctttaaaaccataaagtaaaatgctatactagaaggacattgggtgcgctgaaaatgcgcagcctgaaaggagcttttatgacgcagcttttgatccgtctttttatacgccgtcccaattctccgcaggatccccgcgtccgcgccgcctatggcaatctggccagtgtggtgggcatggtgtgcaatatcctgctctgtctgggcaagtttgtggtgggcaccctgttcggctcgatcgccatcactgccgatgcactgaataacctttcggatgcttcctccaatatcgtcagtctggtgggctttaagctggccgccaaggcaccggatgccgagcacccttacggccacgcccgctttgagtatctggcggggctggtggtcagcgtgaccattctgggcatcggcttctccctgctgaaggaatcaatcaccaaggtgctgcaccccaccccggtgcagttcggctggctgaccgtggcggtgctggtggtgtccattctggtcaagctgtggatgagcggcttcaaccgcaccatcggccgcatcattgcttcggagacccttattgccaccgccgccgacagccgcaacgacgtgctgagcaccgctgccgtgctggtagccgctatcctctgccgtgtgaccggctgggacgtgctggacggcctgatgggcgtgggcgtggcagtgtttatcctgatctccggctggggactggtgatggataccctgagcccgctgctgggcgaaagccccagcgaggatctggtggagcatatcgaacagaccgtgatgagctatcccggcgtgctgggcgtacatgatttgatggtgcacgactacggccccggccaccagtttgcgtccatccatgtggagctgcccgccgagcaggacccgctggaagcgcacgacctgatcgacaacatcgagcgggactttatgaaaaacgaccacctgatggtgaccatccactatgaccccatcgtcacctcggacgccgccgtgggggtgctgcgcagccgcctgaccgaaaagctgcgtcagctggacccggcgctctcgctgcacgacctgcgcatcgtgccgggcaagacccacaccaatgtgctttttgatctggtgctcccggcgggctatgccggggacaaggtggagctgctgacccagatggagcagttcatcaaacagcaggaccccgcctataactgcattatcaagctggaacagagctatacggctgcggctcataaatgagggggagccgccccgcacaggctttgcgatataaggcaataccgcataattctaagtgccgatacggcgagtgaggtgcggcagatgctaagccaaaagcacagataatactttgtgtattatcgagcattttggcaacgcagatgccgtgccgcagccgccggagtggtgcttaagccgtaaggcggaaattgtgcggtgttgccataaggaaagcagagggaaagtagtatgctgaacgaaacctaccgcgccatgctgaacaacaaaagcgtcatccgcgagaccttcatgtatggcagacagcgcgctgcccagatcggcagcgagaatgtgttcgattattcactgggcaaccccagcgtgccctgcccgccggagtttaccgaagccatgcagaccctgctggcacaggaggagccggtaagcctgcacggctattgccccagtcagggcgacccgggcttccgcaccgctgtggcggagcatctgaccgagaccttcggcctgccctacgcgcaaaagcacatcttccccaccaccggcgcggcgggtgctatcgcccacgccatccgggcggtgacccagcccggggacgaggtgctgacctttgcaccttacttcccggagtacggcccctatgtggcgggcaccggcgcagtgctgcgggtggtcccgccgcaggcacccaccttccagcccaatctggatgcctttgcacagatgctgaccgaaaaggtcacctgtgtgctcatcaacacccccaacaaccccacgggtgtggtctactctgccgacaccctgacccgcatggcggcgattctgaccgaaaagagcgcccagtacggacacaatatctttctggtcagtgacgaaccttaccgggacatcgtgtttgacggcaagaccgtgccttacccggcggcgttctacccccacaccctgacctgcttctcctactccaagagtctgagcctgcccggcgagcgtctgggctatgtggcggtgcgtccggggtgcgagggggaggacatccttgtggacatgatgagccagatctcccgctttaccggccacaactgcccgcccagcatcatccagcgggcggtcagccgctgccagaaggtgaccagtgacctttcggtctaccagaccaatatggagctgctgtacgaaaaactcaccgcgctgggctttgccgtagagcgcccgggcggcaccttctatatcttccccaaggcactggaagaggacgcaaacgccttctgtcagaaagcccgggagttcgatctgctgctggtgcccagcgacagctttggggtcaagggctatgtgcgccttgcctattgcatcgacaccgaaaaggtaaagcgcagcctgcccgcctttgaaaagctggcggacgcctaccgcaaataaccggaacgcccctgcccggggcataaaatacacaaccaatagaggaaagggaaccctgctatggaaaagatcaagatgacgaccccgctggtggagatggacggcgacgagatgacccgcatcctgtggaagatgatcaaggacgagctgatcctcccctttgtggacctcaagaccgagtactacgatctgggtctgcccaaccgcgatgccaccgcagatcaggtgaccatggatgccgccctcgccaacaagaagtacggcgtgtcggtcaagtgcgccaccatcacccccaacgcacagcgcgtggaggagtacaagctgcacgagatgtggaagagccccaacggcaccatccgcgccgtgctggacggcactgtgttccgcgcacccattatgatcgacagcatccatccggtggtcaagaactggaaaaagcccatcaccatcgcccgccacgcctacggcgatgtgtataagtgcaccgagttccgcattcccggtgcaggcaaggcagagctggtgttcaccggcgccgatggcagccagcagcgtgccaccgtctttgactttgagggtgccggtgtgctgcaggggcagtacaacaaggatgattccatccgcagcttcgcccgcagctgcttcaactacgcactggacgtgaagcaggatctgtggttcggcgcaaaggataccatctccaagaagtacgaccacaccttcaaggacatcttccaggagacctacgatgccgagtacaaggaaaagtttgaagctgccggtatcacttatttttacagcctgatcgacgatatcgtggcgcgtgttatccgcagcgagggcggctttgtctgggcctgcaagaactacgacggcgacgtgatgagcgatatggtctccaccgcctttggctcactggctatgatgaccagcgtgctggtcagcccggatggcaagtacgagtacgaagccgcccacggcaccgtcacccgccattattataagtatctgaagggcgaaaagacctccaccaaccccatggccaccatctttgcatggtcgggcgcattcaagaagcgcggcgagctggacaacctgccggagctggtgcactttggcgaagcactggaagctgcaagcctgcagaccctgaacgatggcatcatgaccaaggacctgtgcggtctggcagagggcatcacccccaccgctgtggacagcgagggctttatcaaggccatccgtgagcgtctggaagctaagctggcataaaacgattttcaatataacgtaaaaaccggaacgatccacccgaaaaagggaagatcgttccggtttgtgttttaggcaggatgtgcgacaaactggaatttatagtcctctcaaaaccaatttgctttttcttctcgaaatacgggaatatcactatctcgatatggattgtaattatgaagattgcaaccaaactcttttaatgattttattttgttatcctgtgtccatacaattaaagatattccgtcaaattcttcaacatttccattattcattttgcttttaaaataccactccacgattgtttgattgccttgatgaaaaaattgcttaatctcccagacaagaacacttccgcgtgtattccattcgtcaaaccagtgctttaccgttttgcggttttcatatttaggactccaactctcagtatatacaacatcatctgtaaaaatattgtcaattcctaaatctgctttcttaatccacatatcaaaccataatcggataattttttctctctcgttcataaagtacctccataacttccgatttgttggttacaaatgcagtgcgtccagcacttcatttacgatgtccagcgatacctgccccggtgcgctggcctgtccggggttggcaaaggtcatggcagagccgaaagtctccccggccagacggctcaccgcgcccagcgcccccatgctcatggtaatgaccggtgtttccgggtgaaggtctgccatctcggcggtggcggccagcagctccagcacatcgctgcggcatcggggcattacggccagcttgggcagatcggctccggcctgctgcatctgtaccatgcgggagacgagctctgcccggggcggggtgttggcaaaatcgtggctggaacataccaccgccaccccggcggagtgtgcctgctccaccagcttgggcaggtcagccccggcggtgaagaactcgatgtccagcaggtcggcgcagtcggtatcgaggatcaggtgcagaaaggcaaggtattccggatgggagagcgcctgctcgccgccctctgccttggtacggaaggtcaccagcagaagcttgtcccgcaggacgacccgcagtttctgtatgcagcgggcgatggcagcgggggactgaaagccctcgaaccagtccgctcgccattccacacaatcggccagcaaggttgaaaactgcgcagccttttccagaatagcagcttgggtacgctccacaatgggcagaatgaccttggggcggccctccccgatgcggcagccgcggatgttgacacaggacatggcgtttctcctttatataataaggatagctaccctatacaggatgctggaataactccataatacgttctgcccgccgccttgtcaagaaaaggcggttattataataggagaaaagcagggggatatttgtcccgcaaagaaattggaaaaaagatgtcaaaaagtgttgacaatcgtccgggggtgtggtattatacttgagcgccaagcgctgagacaaaagaatgacttctgaagtcccagcaggaagcccttgaaaagaaccaatgaacgttcaaaagttttgcggttgcgaaagcaatgaatcgccccagtggggcgttcaagcaaacagagcggtcttgcgaaagcaagatggaggggtttcaccccgacaagctcacggttagcaccgagaaactgctgaacgatttaagttcagaaaagttcaaaagcttctcaaaaaagtgcttgacaaaaaaccacttctgtggtaaaatgatcaagtcgtcagccgcaaggctgcggcgcacaggaccttgaaaattgaacaatatcgaaagaacttgtaacggaacctattttcgtgttggaaaaacacggtaaacaattccaaacaaaagtaattcacacaggacgcaagcgattgcgtgctgagcgaaacaagatttaacacttttaagtgataaatatcatttataaagagtttgatcctggctcaggacgaacgctggcggcgcgcctaacacatgcaagtcgaacgagcgagagagagcttgctttctcgagcgagtggcgaacgggtgagtaacgcgtgaggaacctgcctcaaagagggggacaacagttggaaacgactgctaataccgcataagcccacggctcggcatcgagcagagggaaaaggagcaatccgctttgagatggcctcgcgtccgattagctagttggtgaggtaacggcccaccaaggcgacgatcggtagccggactgagaggttgaacggccacattgggactgagacacggcccagactcctacgggaggcagcagtggggaatattgcacaatgggggaaaccctgatgcagcgacgccgcgtggaggaagaaggtcttcggattgtaaactcctgttgttgaggaagataatgacggtactcaacaaggaagtgacggctaactacgtgccagcagccgcggtaaaacgtaggtcacaagcgttgtccggaattactgggtgtaaagggagcgcaggcgggaagacaagttggaagtgaaatccatgggctcaacccatgaactgctttcaaaactgtttttcttgagtagtgcagaggtaggcggaattcccggtgtagcggtggaatgcgtagatatcgggaggaacaccagtggcgaaggcggcctactgggcaccaactgacgctgaggctcgaaagtgtgggtagcaaacaggattagataccctggtagtccacactgtaaacgatgattactaggtgttggaggattgaccccttcagtgccgcagttaacacaataagtaatccacctggggagtacgaccgcaaggttgaaactcaaaggaattgacgggggcccgcacaagcagtggagtatgtggtttaattcgacgcaacgcgaagaaccttaccaagtcttgacatcccttgacgatgctggaaacagtatttctcttcggagcaaggagacaggtggtgcatggttgtcgtcagctcgtgtcgtgagatgttgggttaagtcccgcaacgagcgcaacccttatggtcagttactacgcaagaggactctggccagactgccgttgacaaaacggaggaaggtggggatgacgtcaaatcatcatgccctttatgacttgggctacacacgtactacaatggcgttaaacaaagagaagcaagaccgcgaggtggagcaaaactcagaaacaacgtcccagttcggactgcaggctgcaactcgcctgcacgaagtcggaattgctagtaatcgcagatcagcatgctgcggtgaatacgttcccgggccttgtacacaccgcccgtcacaccatgagagccggggggacccgaagtcggtagtctaaccgcaaggaggacgccgccgaaggtaaaactggtgattggggtgaagtcgtaacaaggtagccgtaggagaacctgcggctggatcacctcctttctaaggagtcaggcaatgacagagcatctaagatggtcgatcattggaacaggtgacaagttaaagtttaagtagatattgttcgattttgagggccctgaaaaggacactcaaagacgtaccttgaaaactgaataataactgcgaaacaaagattatagtaagttcttttttaagaaatattacaatttcaaaaggaagggtaacaataatcttcgttggcaagagagaatcaagaggataccaaatgttcttgaaagaacgtttgaaaggtcaagcgaacaagggcgcagggcgaatgccttggcactgggagccgatgaaagacgtgataagctgcgataagcttcggggagctgcaaataagcattgatccggagatttctgaatgaggaaactcacctgggttcatactcaggtacgttatactgaacttaaaaataggtatatcgagggaaccgcctgaactgaaacatctaagtagggcgaggaagagacatcaaacgagattccgtaagtagtggcgagcgaacgcggaagagggcaaaccgggagtagaaatacttccggggtacggactgcttttaggacttaatctgttaaccgaacggcatgggaaggccggtcagagagtgtgagaaccacgtaggtgaaaacggagagagctgcgcaggatccagagtacggccagacacgtgaaacctggtcggaatacggggggaccaccctccaaccctaaatactacccagtgaccgatagcgtatagtactgtgaaggaaaggtgaaaagcaccccgggaggggagtgaaaaagaacctgaaaccctgtgcctacaagcacctagagcacgtcaatgtgtgatagggtactttttgtagaacggtccggcgagcgattgtatgcagcaaggttaaggacttaaggtctggagccgaagcgaaagcgagtttgaaaagggcgttaagttgcatacaatgggcccgaaaccgggtgacctacccatggtcaggttgaagtggaagtaaaattccatggaggaccgaaccgacctccgttgaaaaggcggcggatgaactgtgggtagcggagaaattccaatcgaacccggagatagctggttctccccgaaatagttttaggactagccttaagttagatacctggaggtaaagcactgaatagcctagcggccgagaggttagcgaagcttatcaaactcagaatgccagagtattgatgcttgggagtcagacagtgtcagataaatgtcattgtcaaaagggaaacagcccagatctacagctaaggtcccaaagtcaggttaagtggaaaacgatgtgaagatacgtagacaaccaggatgttggctcagaagcagccacacattcaaagagtgcgtaatagctcactggtcgagcgtctttgcgcggagaatttaacggggctaaacctgacaccgaagcttaggcaatacagcaatgtattgggtaggggagcgttgtatacgcggtgaaacagtagcgcaagcggctgtggagtgtatagaagtgagaatgccggaatgagtagcgcgaatgcagtgagaatctgcatggccgaaagcctcaggtttctggaggaaggttcgtccgctccaggttagtcgggagctaaggtgaggcctaacggcgtagccgatgcacagacggtagagattccgtcaccaccaaaagagttaaacacagggacacatttgaagtctcggagccgggtgttggttccggtagcgatcgagggaagttagtaccgaagtccgggatggaagatggcgagaaaagctgtgtgtatttctgcggtgcccgtaccgcaaaccgacacaggtaggtaggaagaagattctaaggccaacgggagaagggttgttaaggaactcggcaaattgaccccgtaacttcgggagaaggggtgctccagagatggagccgcagagaatcggcccaagcaactgtttaccaaaaacacaggtttgtgctaaatcgaaagatgacgtatacgagctgacgcctgcccggtgctggaaggttaagaggagatgtgcaagcattgaatcgaagccccagtgaacggcggccgtaactataacggtcctaaggtagcgaaattccttgtcaggtaagttctgacccgcatgaaaggcgtaatgatttgggcactgtctcgacagcccgcccggcgaaattgtagtaccggtgaagatgccggttacccgcgacaagacggaaagaccccatggagctttactgtagcctaatattgggtttcgatgttgcatgcacaggatagatgggacactgggaaacaagtgctttggcatttgtggagtggccgttgggataccatccttgcgatattggaattctaacctgcgcctttgaatcaaggcgggggacattgttaggtgggcagtttgactggggcggtcgcctcctaaagagtaacggaggcgttcaaaggttcgctcagcttgaacggaaatcaagcaaaagagtgcaaacgcagaagcgagcctaactgcgagactgacgggtcgagcagtaacgaaagttggagttagtgatccggtggtatgtgagtggaaatgccatcgctcaacggataaaagttaccctggggataacaggctgatctcccccaagagtccacatcgacggggaggtttggcacctcgatgtcggctcatcgcatcctggggctgtattcggtcccaagggtttggctgttcgccaattaaagcggtacgcgagctgggttcagaacgtcgtgagacagttcggtccctatctgtcgtgggcgcaggatatttgatgggagctgttcctagtacgagaggaccggagcggacgtacctctggcgcaccagttgttctgccaagggcatagctgggcaactatgtacggatcggataaacgctgaaagcatctaagcgtgaagccgacccaaagataagatatcccattgtttcaaacaagtaagaccccttgaagactacaaggttgataggcacgatgtgtaagtggagtgatccattcagcaagcgtgtactaataggtcgagggcttgaccacaattcgcttgagacttttaagtcaacgaaaaaatgttagcagtgattattcagttttgaaggcacgtccttctacaaatactggacagaagcacagaaatgtgttatactgattcagtcaaatcggtcggtgtcgatgacggtaaggttccacctgttcccattccgaacacagaagttaagcttacttgtgccgaagatagttagctggaaacggcttgtgaaaataggtagtcgccgacttaacaaagagctctgagatgaaagtctcagggcttttttgttgcatttcggggcagaaaatagtatcataaaaggcagaaccttatactttctacagattttcctgttacactggatgcataaaaggaaaggagattctgtatggacaaattaacgaaaaaggggctggacggcacccagctcaagaccattgcactggtgctgatggtgctggaccatattcattatttcttcgagttcaccggctgcatcccgacggtgttcagtatgctggggcggctcagtgcgccgctgtttctgttctgcacggtggagggctttgcccatacccatgaccgcaagcgatattttatccgcatctgggctattggcacggccatggcggcgctggaattctttatgatctacgccaaagccttccggcgcggggatggcttctacccgctgaacgcgatttttcaggatcttgcgctgctgtgcatcgtctggcagggcatcgactggctgcgggagaaaaagcttgcaaagggcattggcgccattgctgccgttctgtgctggccgtttgtggtgatcgtgtttctgctgcttttccccggggtgcagggtatgcccattgcttcgtcagtcgtggcctttgtcatcactagtccgctgcccatgtggacaggtatcacggatggcggatggagttttctgctgggcggtgtgctgctgtatgccctgcgggggcatcgccgcgtacagctgacagtatgggcactggtgattttcctgtgtgactttgcgctgacctttgggatggcttgccgacaggagggttttgtctggacgcagatgttcaccgactactacgagtggttcggcgtagcggcggtgctgctgatgctgctgtacaacgggcagcggggcaagggccacaagcagttgttctactggttctaccccgcccatgtgtatctgctgtatggggcatcctgccttgtttataacgtgttgaggtgattttgtggcaaacattctggcagtggatgacaatctggagctctgcaagctgatccgcactactttggagcgggacggccaccgggtagaaacgcggcaggcgggcagagatctgaccgaggcgctttgccgctgggcagactgcatcctgctggacgtgatgatgcccggggaggacggctttgcggtctgtcggcgcatccgcagcctgaccgaagtgcccattctctttctgagcgcccgcaccgacgaggctgctgtgttggagggactgggcatcggggcagacgactttttatccaagcccttccgggtggcagagctgagggcgcgggtggcggcacatctgcggcggcagagccgcaccccggcgcaccggatggtgcgcagcggcgtagcctttgacctgaccgcccgcagcgcggcggtggaagggagagaactgcccttgacccgctcggagtatgccatctgcgagtatctggcgctgcacgcagggcagacctttaccaaggagcaaatttacgaagcggtttttggtattgacggcactgcggacgacaccgccgtgacccagcacatcaaaaatatccgggcaaagctgcgggcggcgggcgtgccggagccggaaaaactgctcaataccgtatggggcgtggggtaccgatggaaaagcgaagactgacctctctgcgcagcgtgctgctgcaatatctggtgcgcacggcgctggcctgcctgctggtcgcggtggggtggctgctggtgatgatgctgtggatccagaacggcgggctgtttctgcccgccaatcaggctgcacaggcctgtcagaaagccgcacaggacgttttgccgagcatgaccgcagccacctttgatgagacgcagctggactccttgtgccggtacgccctgtttgccgcgccggacagcagcgaggtgctggccaccaacatggatgccgggcacttgcagcgggcaatggagaactggcaggggagaaatcgctggcattttggctacacacagtattatatgacgtcaaaattgcaagacggaacggtttgcctgctgcaatttgactatgccgtgccctacgccgaccctgcgctgcggggcgtgctgccggatatgcagaccgtgcactgcattctgggcattctgctgttggtaggcgcagtggtgtggagcacccacaggaccgggcgcttcctgacccgggagaccgaaaaactgactgccgcagcgcaggcggtggcgcggaaggatctggacagcgcggtattttccggcgcgaaggtgcgggagtacgagagcgctttgcaggcgctgcaaaccatgggcgatgaactgaccggcagcctgcagaagcagtgggccatggagcagcggcagcgggagcagatcattcagctgtcccacaagctgaaaacgccgctgaccatcatcgagggcaacgcggagctgctggcagaggatgacggcctgaccgcagagcagaaagcgcaggtggagtccattttgcagggcgcagagcagacccgcacctatcttggtaagatccgcgccgaggtgcagaccccgctgcgctataaacggaatgtagaatgatgacgaaaaaagacagcactgctgcaaatagcccaacagaaaaatgtgccggacttctcccaaaaggcgttgtccggctcgtttttttgctgtgagcggaagcgggcgggaagcagctacagtgggaacggtatatataaaagtggacagcctgcggtgtcccatatctttttgccccaaaatctgtacgaaacgcgcagaatagttgcttttctccggcagttctgatatactggacacgttttcccattttgaccccgcactggatttcacacgggagctcgatatttttttgacaaggaggaaccgagtgctgcggctcttggctgcgcacccaatacaaaccacattatggaacaaatgttgatctgtctgtcccttgccctgatcgccggtctgctcatgtcacgcgctgctaaggccgtgcgtctgcccgccgttaccgcttacctgcttaccggcctgctgctggggcccttctttctggggcggctgggactgagccgttttggcttcggttttggcagccttgccgccgtagagggctacggcattatcacgcaggtggcgctgggctttatcgccttcgtcattggcaacgagttccgtctcagcgccctgaagcacatgggccgccgcgccgtgaccgtgggcattgcgcaggcagtgatcaccaccgcgctggtggatatcgcccttgttgccctgcactttgcccgcccggacgccatctcgctggcctctgccatcacgctgggctctattgccgccgctaccgcacccgccgccaccctgatggtggtcaagcagtataaggcagacggcccgctgaccaagcttctgctgatggtggtcgctattgacgacgccgtgggtctggtgctgttctcggcatcctacggcgtggcaaacgcgctggagcaggggcgtatcgaccccgtgagcgtggtgctggagccgctgctggagatcgcgctctcgctggcgctgggcgctgccgccggttacctgctgaacctgctggaagtctacttccactcccgctccaagcgcatgagcctgtcggtggcctttgtgctgctgacggtgggcttgtccatgaccgagtttgagatcaatggcacccgctgcggtttctcgctgctgctggtgtgcatgatgaccggcaccgtgttctgcaacgtctgccccacctcggacgagctgatggatcgtctggaccgctgggtgtcccccatcaacatcctgttcttcgtgctgtccggcgcagaactggatctgaccatcctcaccaaccccatggtgctgctcatcggcgtggtgtacatcgtggcgcgctctgccggtaagatcagcggctcttacctgagctgccgcgccaccagctgcagccccgccatccagaagtatctgggcatcaccctgctgccgcaggcaggcgtggcgctgggcatggctgccaccgccgccgagctgtcggacggccacatggtgcgcaacgtggtgctgttctcggtgctggtgtacgagctggtaggccccaccctgaccaagatctcgctgaccgctgccggagagatccgccccgagggacgcaccagcgcccgcgtggagaaccagcccgaagcccctgtggagctgagctgagacggtaaggaagaattatttgtaattttgagggtcaggaaagtccgcggactttcctgaccctcttttcacagaaaagggttctcccccacctttacgtgcaaaaggttgttttttgtcgaagtaacacgcaatcattgacgaaaggtgttattttttgtatactaagcttatcagcgctggcacaattttcctattgtgtcagtggttgctaagtaagaaggaaatagtgaaggagaatgacacattatgaaaagcactggcatcgtccgcggcattgattcgctgggacgtatcgttctgccgaaggaactgcgcaccagtatgcacctcgacaccgacaccaagctggagatctttgtggatggggacgccatcgtcctgaaaaagcaccgccctgccggcagctgcgatttttgcggcgaggtggacgagcaggccatccagttcggcggctactgcatctgtaccgcctgccgccgcaagctcagcgcactgtaactcagaagggaggccctttccatgagtcagttcatcgactttacccttccctccaccgtgccggggcgcaccctgcacggctttcgctgcgtcccggagggacaggtgcgggcggtgctgcagctgtcccacggcatggtggaatacatcgaccgctaccgccccttggcagaatatctggccgaccggggcattctggtcaccgggcacgaccatctgggacatggtgcgtccatccgcaccaaggaggattacggctattttgctgagccggacggcaaccgcgccgtgttgaccgacctgcacgctgtgactgtgcttaccaagcagctttacccggatctgccctactttttgctggggcacagcatgggttccttctatgcccggcagtacctgtgcgagtacggcagggagctggacggtgccatcatcatgggcaccggtttccagcccaaggcgctggtcaagacagccaagaccctttgccgggtgctggcagtctttcacggttggcactaccgcagcagctttgtggccaacctttcctttatgggctacaacaaggggctggagggccgcaccacccacgactggctcaaccgcgatcaggccgaggtggacaaatatctggccgaggagcgctgcacctttacctttacgctgaatgcctactacagtatgttcagcggcatcctgcgtctgcacgacccggcttttctggcacggatgcccaaagacctgccgctgctcttcctctccggcgatgccgacccggtgggcgagcagggcaagggcgtgcgccgcgccatccagagcctgaaggacgccggtgtgctgaacattgaaagcatcttctaccccggtgcccgccacgagttgctgctggagaccaacaagctggaggtttttgcagatatcgccgcatggctggataaacagctggcaaaacagtaaaaacgaccaacgggctgctgcacaaaacgtgcagcagcccgtttttctttggcggcaggggcggcaggcaccgcgcagcagcaaaaagagagaagctgacccgatagcgcctgagcgcacgcgtgccagcgtaagcaaaacaaggcggattctccaaaatggttgcatatcatcgcaaaaaggcaacggccgtcttgtttgttttgtgcacttatgctaaaataacggacagatggttgatttttatagagtggtattacttttctgatgctgtaaaaaattcggctgagccgaaaaaaataaggacgcaacaaaaggagaacacgccatgaaaaaacttttcgccatgacggtggccgtgctgctgctgttttcagtgctgctgggcatccccgccgcctatgggcaggcaccggagacgggcaaaacgctggacatcctgttcagccacgacacccactcccacctgaacaccttcaccaccgtggtggaggatgaggagacggacatcggcggctttgcccgcgccaacaccctcatcaaggcgcagcgcgccaaagacccggacacccttgtgatcgacggcggtgacttttccatgggcaccctgatccagaccgtgtttgaaacgcaggccgcagagctgcggatgctgggctgcatgggctacgatgtgaccaccttcggcaaccacgagttcgactaccgctccaaggggcttgccaatatgcttaccagtgcccgcacctccggcgatgccgtcccggccatcgtggtctgcaatgtggactgggacgctatggaaagcgccggtcttaccgagggccagcagctgctcaaggacgcctttgccgcctacggcgtgcaggactacaccgtggtgcagaagggcgatgtgcgcattgccgtggtgggcgttttcggcaaggatgccctctcctgcgcgcccacctgcgagctgaaattcaaggacccggtacaggcggtaaaggccaccgtggcagagatcaaggcgaacgaaaacgtggatatgatcgtctgcgtttcccacagcggcacttgggacgaccccaaaaagtctgaggacgagctgctggccaagggtgtacctgaccttgaccttattttgagcggccacacccacagccgcatccgggaacccatccggcacggggacacctatgtggtctcctgcggcgaatacggcaaaaatttgggcagccttaccatggcacaaaaagcggacggccgctggcaggtgagcgattaccagctgatccccatcaccgccgacatccccgccgatgcacaaacgcaagaggtcatcgaccgctttatggacacggtggacgaagattatctggcgcagttcggctacaccaaggatcaggtgctggcagaaaacgatgttgttttctccaacctgaaggatctgggcaaggtgcacaccgagcacaatctgggcgatatcatcgcggacgcctacgtgtacgcggtggagaacgccgccgactatgacggcgtaccggtggatctggcagtcgtgcccagcggcaccgtgcgcgacacctacgcccggggcgatatcacggtggagcaggtgttcaactccttctcgctgggcatcggcgcagacggtgtgccgggctatcccctcatcgaagtctacctcaccggcaaggaactgcgcaccgccgccgagatcgacgcttccgtgtcggatttcatgaccaccgcgcggctgtattgcagcggcctgaactttacctacaacccccaccgtctgctgctgaacaaggtgacggacgtctatctggtcaaggacgggcagcgcgtggagctgcaggacgacaagctgtaccgcatcgtggccgacctttacagcgggcagatgctgagcgccgtgacggatatgtcctacggcattctgtccatcgtgccgaagtacgccgacggcacacccatcgaagattttgaggatgtgatcctgaccgaaaacggcaaagagctgaagggctgggacgccattgcgcggtacatggcgtcgttcgaggataccgacggcgacggcatcggcaacgtgccggactattacagcaccctgcacgaccgcaaaaaggtggaggacagccgcagcctttccgcgctgctgaaaaagcccaaccgctttacctttatcctccttggcatcattctcaccgccgttgtactggtggtatgccttgtgctgctgctccgcaagctggtgcgcaagctccggcgcagaagaaaggttctggactaagcccgacgatttgaaatggccgccgcgtgcgctttggccatgatccaaggaatttgattttttattcgggaccccggagcgtctgcggacgctccggggtccccttttcacaaataaaaaggatagcggaacacccgcaggggtgttccgctatcctgaaatgcaaaaagcttatgttagccctcgatgagctccacggtcttcatcttgaccggggtggtgggcttgtcgttccagtcggtgcggacagaagcgatcttatccacaacgtccatgccggcaactaccttgccgaaggcggcgtactggccgtccagatggggggcatccttgtgcatgatgaagaactggctgcctgcgctgttggggttcatgctgcgggccatgctgatcacaccgcgggtgtgcttgagggggttgttgacgccgttagcggcaaactcgcccttgatgttccagcccgggccgccggtgccggtgcccagcgggcagccgccctggatcataaagccggggatgacacggtggaaggtcaggccgttgtaaaagccttccttgaccagctttttgaaattctcacaggtgatgggggcaacttcctcgttcagctcgatgtcgatgatgccgccgtcttccatagtaatgcgaaccataacgctacaatactccttttgtgttgaccccgcagcggggggtgttggtgggcagaaatgcctgcccggatatcccttatagtataccataggttttgcccgttgcaacgatgcagatgcaacgtttttgtgaattatctgccccaataggctaaaaatacgcgccgcaaccggagtttacgctctggttggtggacgcaaccgggcttttgtgctaaaatcgtgccacaaaaaaccacaagagaaagcttccaaaggaggaaacgaatatgaaaagtgattttctgaccaacctatttttcagagcgctccagacggtgagcatcgcgacgatgctcgtgcggctgctgctaccggtggccatcgtggctgcactctatctgctctggcgtattgcccgcaatctggaaaagccgcccaaactcacggaggaagtcaagatcgtgcgcaagtcactttccgaaatgctcaaggagaaccgcacccgctgcaagatgacacaggagtttgtggctgagagcatcggcgtaagccgtcaggcagtgtccaagtgggaaaacggagtttcccatagttaaagataccacaccaaatatgatgaacccacgcttatacactaccagctataataaaccgcaaggacagcaatttgatgatactgctgtcctttcttttataaaattgcagtacacataaaaaagctgtaaaatgataaatatatttgtccttgtaacaattctcggacatttgcctgttatactatctgcaaaaagcaaaggaagtgagaatatggagcagattttaattgtcgaggacgacagttttttgaataagatgttagactataacctgaccgcagacggctacggcgtgacttctgccctaaatgccagaaccgcagccgaagccatccgccagcgggaatttaatttagtgctgctggacatcaacctgccggacgggaacggttttgaactgtgcaagctgataaagccccagcacccggacaccatcgtaatattcctgaccgccaacgatcaggagagcgaccagatacggggctatgaggtgggcgcggtggactacatcacaaagccctttgtgatcggggccttgcagcggaaaatcaaagccatgttcgccatgctggaacaccacaaaccggccaaggacatttacgacgacgggcggctgtttctggacttctcggagcagacggcttccctaaacggcaagcccctgaccctatccccgatggagtacaaaatgctgaatctgttccgcaaaaatccccggcaagtgctgacccgtgggcagcttttggaaaagctgtgggatatagacgaaaggtttgtagacgaacacaccctgacaacttctatcagccggattcgcagcaagattgaatccgacggcggcgcgccctacatcaagaccgtttacggcatgggctatcaatggacgggaggcgaggcaaaatgaagtttcaaaacctctcggtaaagcggctgtttggccgggtggcaatagggtttgccctctccatgtccgggatcaccatagccctttttcttgtgacaaaacagacggcggtgctgctgacgggcggggcgctgctgttgtgcgcccttgtagggatttttgtactgacgcaggcgtttggaaaacggttatcacagtttaccgctgacctgtgccagaccttagaccacatgatcgccggaaatgaagcgccccagcggccagaggacagcgaaacccagcttgccagaatcggacaccggctggcaaggctttaccagatcatgcaggagaaccgccgccgggtggacgaggaacggcaggagttacagacccttgtatcggatatttcccatcaggtgaaaacgccggtaagcaatctgaaaatggcgacggacaccctgctggaaaagcctatggccgaggcagagcgcaccgactttatccggggaatccgcagccagacggataagctggactttctctttcaggcccttgtgaaaacctcccgtctggaaacaggcgtgatccagttggacaagaaaccgggccgcctctttgataccatggcacaggccatgagtgggatcgtgtatgcagcggagaaaaaggaaatcgccgtgtccgtggactgcccggaggatttgaccgtttcccatgacagcaagtggacatcggaagccctctttaacctgctggacaatgcggtgaagtacaccccggcaggcgggaaaatcgctgtgtctgtggtgctgtgggaaatgtatgtggaaatcaaagtgaccgacactggcaagggcatttccgaaagcaatcaggccgctatcttccagcgcttctatcgtgaggaagaagtacacgaacagcagggtgtgggcattggcctgtatctggcccgcgagatcgtaacgcggcaaggcggctatatcaaagtggtttcggagccgggcaagggttcagaattttccattatgctgccgacaaaatagaatgcggcggacggtcattctcggctgcccgccgtaagtcttttcgcaacagtgtgccgataaagctgccagtggcagtttttcggcggaaatgtccgagcgttgtaacatttcacccccgattttcaatgaaattttttggccgctgtaacatttcgcggacatttgggttttacaatagccttatcaacaggcagaaagccttgaaaggagttttgagtatgagaattttacagactatcgacctgaaaaagtattacggtacagagccgaatatcacccgcgcccttgacggcgtgaacttctctgtaaatgacggtgagtttgtggccgttgtgggaacctccggcagcggcaagtccaccctgcttcacatgatgggcgggctggacactcccaccagcggaacagtgattgtccgaggcgaagaactggcaaagaagagcgacgaacagctcaccatcttccgccgccgcaacatcggctttatcttccagaactataaccttgttccgatcctgaatgtgtatgagaacatcgtcctgccggtggagctggacggggacacggtggatcagaagtttttggacgagatcgttcatctgctggggctggaagataaactgaaaaacatgccgaacaatctttccggcggacagcagcagcgtgtggctatcgcacgcgccttgattaccaaaccggctattgtgctggccgacgagccgaccggcaaccttgacagcaagaccagcgccgaggtgctggggcttatcaagcgcaccagtgcagagttccggcaaactgttgtgatgattacgcacaatgacgacattgcccgtcttgcagatcggattgtccgcattgaggacggcaagattgtggagtaaggaggtggcaggctatgacatggccttttgagaatgataccagcgccattacaaagaagctggcaaagaaaagtttgcaaagcgagaagcgccggaatctgatggtggtgattgccgttgcgctggcggcatttctgatctgctttacgggaattgtgtctacctccctgacacaaatgcagcgcaatcaggttgtcgatacttatgaggcggtctggctgggcgtagaggaaaacgacattgaaaccctgaaaggactgccggagtttgagcgcgtaggcggctactatatgctgggtgaggagctttcagaacagggctatcatgcgtcctatgtgtattgcgacgcgcaaatgatggagattgccaaggcgcagatggagttgttagagggccgggttcctgaaaaagcaaatgaagttgttgtaagcgaatactttctttccacctatggaaacaatgccaagatcggggacactgtgaccttagatacagagagttttcatggtgattatgtcgttaccggcattacggacagcgtaaatgaaaaagaagcgaatacctgcgctatcattctttccaacgctgccctgacagaatggaacgggtttgacccggctggctatcgcgcctatgtccatttcaaaaacagcgaccagttgggcgaagaactgatgacctcttattgcagggagattgcggaggaatatcagcttcctatgcccaaaatgaacagtaagtattttgcctatgcttctaaatcctttgattttgcactgatggcaggtgtgattgcccttgttctgattggcggctatattgtgatccagagtatcttccgtatctccatcaatgacaaaatccaaagctacgggcagcttcggacgattggtgcgacaccaaagcaaatcaagcggattgtaaagaacgagggacgcaaactcggcagtatcgggattctgattggcacagtgctgggcgtatgcggcggtttcctcctgttttccaagggttttaacgctgtttcctatgtggcaacggttattttaacgcttataagcagttggatcatgatatctgtttccatccgtaagccggtgaaaattgcggcagggatttcccccattgaagccgtccgttttaccccggcgcaaaaggacatccgcagccggaaaaagaatatcaagctcaatcctgtttcaatgggaattgcaaattttaggcgtgaccgaaaaaagaccgttgctattgtagcctcattgagtttgggcggaattatcctgcttgtggtatcctccattgttttgctgcgctcaccagaggcgcttgcaagacagtttttcccagacggcgactataaaatttatttggattctgaaatgacagaagaaaaggttatggcagcgggaaatccattgaatgaggaattaaagcagaaaatcttatctattgatggcgttacagatataattccaagcaggcaatctctccatgcaacttataaaacagagattcatcaagctggtggtatgtgcgatatgctgaccgaccagaattatgcggcagttgaagcggctctgacagagggaaccatgccaacagattcccgtagtattgtaattgactataatgtgctaaagcagaatgaggatatgggtgttggttcaacggttgagatttctttgggagaagaacagccatccgtttctgttaccatatcggggttatacgctcctgcaaaggtatattcaggacatggcaggatgcacttagatggggcaactctttttgcaccagaagcgttgttccacgaactgcacccggaaatcacctcttttgactattcatggagcattgtaaatgacgctaaaaaaacggactatgtgggagctgaattgaaaaatattgttgccagccatagtaatattgccttagatgaaatcaatacagtgattgaatatgaagaaatgacaaattcttttgcgtttggcagtatggagatactttcatggttggtatttctctttggcgttatcaaccttatcaatacgacactctctaaccagatagcccgaaagcaggaaaacagtattctgcgttctatcggcctaacacaaaaacagctatgtaaaatgaacatctgtgaggggctgtgctatgcgctctttgcaacattggcgacgctgatcgttgggcttccggcttccatctttgcttgcagaaaaatgagtataggagcttttgccggaaatgtagtgccttacaaattcccggttttggaaatgggactgttcattctggtattgttcggaatggaactgatcttgtctgtatggacaatccgcagacagaaaaagcaatccctgattgaacaaatgcgggcgatggaataaccgtatgggatcggcggggcggcgtgtgctgccccgcttttttcgccatttctcaaaaaatttttgaaatgtccgagctttgtaacaattcagcctgtttttttgtcgaaatcaaaggcacctcggacatttatagttcttccaaaagtttgatgataatattaccattcatggaagaagcaatctgttattgcaataatgcgaaattgacgatagaaagtttttcatatctcggtcagctca

SEQ ID NO: 668 - DNA, 661 bp, Faecalibacterium prausnitzii
  source 1..661: mol_type = genomic DNA
ggaagccccgcagccgaagcagtaaaagcggctgtccactttcatgctgggcgtgcggtcattgtggaatggacagcagaccatgccgtttctccccacccggattccatagaatgaagcagcctgccgggtggtaacagactgtttcaccgcttcaaatacattcaaatgctccctccataaaaatactggtagcggtaaagctgccggttatatcatagctccatctcatgtttctttctctgtactgcctgtggctgctccctccggcgcagtgcggtatctacggcgttctgcacctgccgtagccgtatgacttcctcccggagtggcttgtgctgcggagacagttcggcatactctgtttttaactgtgcgtattcctgtttccatgctttcagggcaatgggttttccgtccagtttttctttcaaaatacggcgggcggcataaaacagccgtaactccgcatcgtgggatgtttcaaatttctccctctgtttcttaaacttgatattgttcaattccgtatgaacaggttttagccgctggtaattctcgccctcccgtatcaattcctgcaattcctttatccgggcagatttctttttcatggagtcgcttaacgcttcaaattcttcgttgacagaggaaagacgct

SEQ ID NO: 669 - DNA, 563 bp, Faecalibacterium prausnitzii
  source 1..563: mol_type = genomic DNA
tgcggcttgaacagcgaatttcagagcttgccgccggaaacgcaggaagcggtcaaaaggacgatggacacaatggaaccggcgcagacaccggcagaaatccgggaaacattagaggggacgcagaaaggcggcgtgaagaacagcatccgaaactgcctgacggtgttccagcgtgaccctctgtttcgcggggcgctgcgcctgaaccttttgacggagcagattgacattgtgaagccgctgggctgggagcgcaccagtaccacgctgaccgacatggacatgaactacctgcttttgtatctggaagaaaattacgggcttaccagcgagaaaaaggtgcagagcgccatcaagattgttgccaatgaaaaccgctaccatccagtcagggattacctgaacagcctgcaatgggacggcacagagcgcatccgttacgccctgcatcactttctgggagccgatacggacgaatacacctatgaagccttgaaactgttcctgatgggagccatccggcgggtattcagaccggggagcaagtttgaggtcatgct

SEQ ID NO: 670 - DNA, 535 bp, Faecalibacterium prausnitzii
  source 1..535: mol_type = genomic DNA
ctggaagatgtgatccagcacgctgccgccgcttcctgaaaaaatacggaataacgactgtcaatcagcccacgcttatgatatacttgtaccagcgagtattgtataagcgtgggttgtttcttttagaaggaggatttttaaccgtgaaacaaccatacaatacaacgatttataacactgcactatatttgagattgagccgtgacgatgaattacagggggaaagcggcagtatccagacccagcgcatgatgcttagacagtatgccgcagagcatgggctgaccgttgtagacgagtacattgacgacggatggagtgggacaaatttcgagcgtccaagtttccaaaggatgattgatgacatcgaagacgggaaaatcaactgcgttgtcacaaaggacttatcccgtctgggaagaaactatatcctgaccggtcagtacacggaaatctatttccccagcaagggagtacgctacattgccatcaatgacaatgtggacaccatcaacggagaaagcgagcttgc

SEQ ID NO: 671 - DNA, 454 bp, Faecalibacterium prausnitzii
  source 1..454: mol_type = genomic DNA
cccgtcaaccggctgtcaaccaaagcgtcaaccaaactgtcaaccggtggcttttcagaatggaagttccatttgccgggcttcttcttccgtgatttcctgaaaaccgtccccctccggcggagcttggttgacacgctcccagcctttttgagaaccgtatttcttataccgcttcgggcttttgtaggctacccagccctgtatgatgccgcccgcaatgccggtattcataatctcgcagattgcccgtgtctcccagtctgccggggaatttaagttccccagcgcttcctcataaagctgcttggaacataccctgtcgccggtgtagtcctccaaataggcgtagatcatgccggcctgtgtgtcttcctgcataaagtcctgctggtgggcgttcaggtatcggttcatttccatgctgaatgacagcttatacttcccactgcga

SEQ ID NO: 672 - DNA, 270 bp, Faecalibacterium prausnitzii
  source 1..270: mol_type = genomic DNA
ccggagaaagaggacggcggcatccctaacccgcattttcatgtgatgacaaccatgcgccctttgaacccggatggcacatggggacaaaaacagcgtcgggaatatcttcttgatgaagatggaaaccgaatccgggataaaaacggcgattatatgtttaacgctgtccatacaacagactggcatgaaccggaaacgctggaacactggcgggagcagtgggcggctgccgttaatacaaaatttgaggaaaaagggctggatgta

SEQ ID NO: 673 - DNA, 221 bp, Faecalibacterium prausnitzii
  source 1..221: mol_type = genomic DNA
tgttccagcaggacagtggttttttcatattcctgcttcaactgttccaaagatttttccatgttctcacatcctttgctgataagataaagaaagaccatccgcagacagtccgtgtgtcagtgcttctataaaacccgatgaaaagggaaaaccgcagagcggatttctctttgcggcgggtacacaggggatagccgctttagcggcgcaagggggtg

SEQ ID NO: 674 - DNA, 221 bp, Faecalibacterium prausnitzii
  source 1..221: mol_type = genomic DNA
ggtttggaaagttcttcttttacctctgccatccagacaaacagggctttgatcttcttcctcacatcctgcatgagccggttggtggctttaatccagcggttcagttcccctttctcggtgcggatgccctttgcttccatctgccggacattagctccctcgtggacagtaggtatcaggtcaagcccctgccgcacataggaacggtggtcgatacg

SEQ ID NO: 675 - DNA, 216 bp, Faecalibacterium prausnitzii
  source 1..216: mol_type = genomic DNA
ggggatgtgatcgactttgccgctttgctgcatggattggggaaacgggaagctgcggtcaggcttgcggaggacttcggcgtttcctatgagaaatccggcaatgcgccgccagataggaagcgtcacaacaggtcacagccccgacaaaaatcagcggagcagagatttcaggaaacggaacggtattgtttccgggtgctatgcgattatctg

SEQ ID NO: 676 - DNA, 202 bp, Faecalibacterium prausnitzii
  source 1..202: mol_type = genomic DNA
ctttacagcagctactatggagaagtcagcgactacaccaaaaagggcggcgtgatcgcttcggaaatcatgctgccgccccatgcgccggaaatatatcttgaccgggcgaccctctggaatgctgtggagaactgcgagaaacatccaaaagcacagcttgcctattcctttgatattgccatgcagaatgaattgacgc

SEQ ID NO: 677 - DNA, 197 bp, Faecalibacterium prausnitzii
  source 1..197: mol_type = genomic DNA
ccggcagaccggctgcggcaatgtgtatttggagggacgaccaaccggcaggactttttgccccgtgaccgcaccggcaaccggcgctttctccccgtgacggtgtacccggaacgggcggaggttcacatactggacgatgaagcggcggcgagggcgtatatcgaacagatgtgggcggaagccatgacggttta

SEQ ID NO: 678 - DNA, 184 bp, Faecalibacterium prausnitzii
  source 1..184: mol_type = genomic DNA
cctttccctgtcgctgacattgagcagccgtttcagcagcttgtcctcatctttctgtgccagcatagaccagtattgcagtcttgcaagcacataggcatacagtacatcatagcggatatagtgcatggaacactggcgtaatccctgtccgttcttgctgcaatggtagtacccgtatggt

SEQ ID NO: 679 - DNA, 178 bp, Faecalibacterium prausnitzii
  source 1..178: mol_type = genomic DNA
acacctcctttccctgtgcggcgatcaatgccgctttttcttctatttctccgtataacaaaatatccaaaaggtattctgtgtagcttatcctctgcaacgcttccacaaaaagaggatgccagatggcatcctgcggctgtggggcgtgtgctgttttccaatgctccagcaggcg

SEQ ID NO: 680 - DNA, 176 bp, Faecalibacterium prausnitzii
  source 1..176: mol_type = genomic DNA
gcacaggtcaagagcattttgaaagaggaaacctacatcggtcacagcgttcacaacaagcagagcaacatttcattcaagaacaagaaaaaggtgcggaagccgcaggaagaatggtatcgtgtggaaaatacccacgaagccatcatttccgaagaagtgttccaaaaagttca

SEQ ID NO: 681 - DNA, 168 bp, Faecalibacterium prausnitzii
  source 1..168: mol_type = genomic DNA
gaaaagcctgatatttggggcatttctctcctttgtcaaccatgtcaaccaagaaatcaaagaaaaagtaaaaagtaataatagagcgcctatggattgttttcaaagtcttttctgccggttgacacggtttggttgacacggagacagtctgcggctgtacacctg

SEQ ID NO: 682 - DNA, 157 bp, Faecalibacterium prausnitzii
  source 1..157: mol_type = genomic DNA
gtgtgtaccagctcataggcgctcgctcttgaaattcccataatccgctgaatgtccgccacatccagaaccagcggtaaatcctcgtagctgttcaatctctttttatcgttcattctgttcctcccataaatcaaataggttaaaatgcttcctg

SEQ ID NO: 683 - DNA, 147 bp, Faecalibacterium prausnitzii
  source 1..147: mol_type = genomic DNA
tataaactgattctccatccctatcccctgcctttgtttatggtaattatataattcagttatatccgttacactcatggtatcgcagaatcattgttttgtcaaggatagtacgctatgatgattgcggttggtaatttcgtaccg

SEQ ID NO: 684 - DNA, 137 bp, Faecalibacterium prausnitzii
  source 1..137: mol_type = genomic DNA
ctgcggtcatttaagaagaaagaccattccaaccgccgcttgttactcattcttgccataaccggctcctttctccgtttctatctgatgtacgcagataggctgttttgatgtagcgtctcggtatcatttttaag

SEQ ID NO: 685 - DNA, 133 bp, Faecalibacterium prausnitzii
  source 1..133: mol_type = genomic DNA
ccttgtcggagcgaagcgaacgcagacctcggattgctgattttatcagcggcagaggtaagctccgcaggacgcacgatacatggtctttagactatgtatagaagtgcgcccttagttcctaagggatttt

SEQ ID NO: 686 - DNA, 132 bp, Faecalibacterium prausnitzii
  source 1..132: mol_type = genomic DNA
tgatcgcttattacaaccagcgcaacgcaggggcatggagcaataaagccagaaccggaaacttaaagcagtttgccgaagccgtcaattatctgacggaaaacaagctgctcacattagaggatttgcagg

SEQ ID NO: 687 - DNA, 132 bp, Faecalibacterium prausnitzii
  source 1..132: mol_type = genomic DNA
gcaaggtcaaaaatcttctctacaatccagcgtgtttccgggtcgatcagaagatgaccttttttgtccgggtcttttacatagcccagcggtgcataggctccatagtgtgcgccattggcaaatcttgtg

SEQ ID NO: 688 - DNA, 132 bp, Faecalibacterium prausnitzii
  source 1..132: mol_type = genomic DNA
ttgccgttctccccaaaagccgttttcctgccccattcctgcggtgtttccctgcattggtgcgccgaatgcgtcacttctcctgccggtcatatcccttttggacggtcattcacttgtcaaggtactgtg

SEQ ID NO: 689 - DNA, 131 bp, Faecalibacterium prausnitzii
  source 1..131: mol_type = genomic DNA
ccgtttccggcagtcttgtcctttttcttggaacgcttggaaagatacttcgggcagtcaaccacaaccgcccggaagctctgtttacattcgtgctggcatttccggcacagttcgttgtaagtgatacg

SEQ ID NO: 690 - DNA, 130 bp, Faecalibacterium prausnitzii
  source 1..130: mol_type = genomic DNA
tttcgtgaagctgtcttatttttgtttcaagctccttttgctcgttctggtacttctcggacagcatattgaagttatactcggttatgcgtccggcagaccagtcctcatacattttagcaaacagccc

SEQ ID NO: 691 - DNA, 125 bp, Faecalibacterium prausnitzii
  source 1..125: mol_type = genomic DNA
tggaaacagccggagctggagcaggcggcaagcgaatttctttgggagaaatatcttagcaacgaccctctgaaaatgtatgtggcgttccgtatctggaacagctatctgcttgccagagaacc

SEQ ID NO: 692 - DNA, 124 bp, Faecalibacterium prausnitzii
  source 1..124: mol_type = genomic DNA
cagaggtgctttgtgatatgacacgcccactgggaacttttttgataaactttgagcgtgacacggacagagactggaacttatacgggctttctccgctgcggcaagctctccactccaaccg

SEQ ID NO: 693 - DNA, 124 bp, Faecalibacterium prausnitzii
  source 1..124: mol_type = genomic DNA
cgttttggctcccgttcagacggaagcggatctgctgttcttccccaatcaaaatccgctctttcattttcttcctgtccagcgtcaggacaaacaaaattctctcaaaacatggctcatgccg

SEQ ID NO: 694 - DNA, 119 bp, Faecalibacterium prausnitzii
  source 1..119: mol_type = genomic DNA
ccggacaaccggcgcacagaagaatgtgtgtctgcctatgcgtccctctacccgttgattacctattatctgaacaggctgaatgactgggggctttgcttccggcggtgcaaggtctg

SEQ ID NO: 695 - DNA, 119 bp, Faecalibacterium prausnitzii
  source 1..119: mol_type = genomic DNA
agcctgtattttttccagacggtcagccggaaagcctgcggtattttttacccggtttattttgttgcgccagttctggcattcatttttataaagcaggtcatagttattttctcttg

SEQ ID NO: 696 - DNA, 119 bp, Faecalibacterium prausnitzii
  source 1..119: mol_type = genomic DNA
cttgaaattgtttcggttttcctgtctccctgtcaaagctcatggtttcgttttggaataccccggtcagtctgctcattttatccatgaagcggtcacaggcagcgttacggtcacgg

SEQ ID NO: 697 - DNA, 116 bp, Faecalibacterium prausnitzii
  source 1..116: mol_type = genomic DNA
ttctgcttgttttccccataggctaaagaccatccgcagtctgcacattttatcaatcctgcgaaaatctgtgtcgtaccgtttctgcgtttcctgcgtctgcttgcaatcagctc

SEQ ID NO: 698 - DNA, 115 bp, Faecalibacterium prausnitzii
  source 1..115: mol_type = genomic DNA
aggctgtcaagcggcttcccatcctgtgcgaaatgctccgataccttgatacggactttccccatgacaaaatactgggtgccgtctttttcggtaagcagggtgccgctgtttt

SEQ ID NO: 699 - DNA, 114 bp, Faecalibacterium prausnitzii
  source 1..114: mol_type = genomic DNA
ggaaaaacggaaaatgcagcgtttgaaaaaccggcaggcgtatctggaaagcggttcccggaaacagaggacgcaccggctgattacccgtggggcagctattgagagcattgc

SEQ ID NO: 700 - DNA, 112 bp, Faecalibacterium prausnitzii
  source 1..112: mol_type = genomic DNA
ccttttccgactttaagaaagaagccttacagagaaaaaaggctgtaaaaacaggaacggccagcccgaaagaatttacggactggctgtatcagcagagtaatgtaattgt

SEQ ID NO: 701 - DNA, 111 bp, Faecalibacterium prausnitzii
  source 1..111: mol_type = genomic DNA
aagctggacgatgaaaatgtgtaccgcaagctgcaagggcattggattatcgagatgtcggagatgattgccacagccaacgccaagagtattgaggaaatcaagtcattc

SEQ ID NO: 702 - DNA, 101 bp, Faecalibacterium prausnitzii
  source 1..101: mol_type = genomic DNA
acctctcgtcaaattcccgcttgttttgaagcgcctgtgcttttcggcacttgtcgctgcacagctcataccgctggctctttgccagaaaatattttcca
